(19) United States
(12) Patent Application Publication
(10) Pub. No.: US 2024/0093202 A1
(43) Pub. Date: Mar. 21, 2024

(54) Suppression-Replacement Gene Therapy

(71) Applicant: Mayo Foundation for Medical Education and Research, Rochester, MN (US)

(72) Inventors: Michael J. ACKERMAN, Rochester, MN (US); Steven M. DOTZLER, Rochester, MN (US); William GENDRON, Rochester, MN (US); Sahej BAINS, Rochester, MN (US); Changsung John KIM, Rochester, MN (US); David J. TESTER, Rochester, MN (US)

(73) Assignee: Mayo Foundation for Medical Education and Research, Rochester, MN (US)

(21) Appl. No.: 18/270,014

(22) PCT Filed: Dec. 30, 2021
(86) PCT No.: PCT/US21/65682

§ 371 Date: Jun. 28, 2023

Related U.S. Application Data
(60) Provisional application No. 63/132,316, filed on Dec. 30, 2020.
(60) Provisional application No. 63/179,083, filed on Apr. 23, 2021.
(60) Provisional application No. 63/208,556, filed on Jun. 9, 2021.
(60) Provisional application No. 63/270,388, filed on Oct. 21, 2021.

(51) Int. Cl. C12N 15/113; A61K 38/17; A61K 48/00; A61P 9/00; C07K 14/705; C12N 15/86

(52) U.S. Cl. CPC C12N 15/1138; A61K 38/177; A61K 48/005; A61P 9/00; C07K 14/705; C12N 15/86; C12N 2310/14; C12N 2320/34; C12N 2740/16043; C12N 2750/14143; C12N 2840/203

(57) ABSTRACT

Methods and materials for treating a mammal having a congenital disease (e.g., a congenital heart disease such as congenital long QT syndrome) are provided herein. For example, this document provides methods and materials for generating and using nucleic acids to treat a mammal having a congenital disease, where the nucleic acids can suppress expression of mutant disease-related alleles in the mammal while providing a replacement cDNA that does not contain the disease-related mutation(s).

### CROSS-REFERENCE TO RELATED APPLICATIONS

[0001] This application claims benefit of priority from U.S. Provisional Application Ser. No. 63/132,316, filed Dec. 30, 2020, U.S. Provisional Application Ser. No. 63/179,083, filed Apr. 23, 2021, U.S. Provisional Application Ser. No. 63/208,556, filed Jun. 9, 2021, and U.S. Provisional Application Ser. No. 63/270,388, filed Oct. 21, 2021. The disclosures of the prior applications are considered part of (and are incorporated by reference in) the disclosure of this application.

### TECHNICAL FIELD

[0002] This document relates to methods and materials for treating a mammal having a congenital disease (e.g., a congenital heart disease such as congenital long QT syndrome). For example, this document provides methods and materials for generating and using nucleic acids that can be administered to a mammal having a congenital disease, and can suppress expression of mutant disease-related alleles in the mammal while providing a replacement cDNA that does not contain the disease-related mutation(s).

### BACKGROUND

[0003] Congenital long QT syndrome (LQTS) is an autosomal dominant disorder characterized by delayed repolarization of the myocardium that is associated with a prolonged QT interval on electrocardiogram (ECG). Patients with LQTS have increased risk for torsadogenic syncope/seizures and sudden cardiac death (SCD). The prevalence of LQTS is about 1 in 2000, and when untreated, higher risk patients have an estimated 10-year mortality of 50% (Schwartz et al., Circulation, 120:1761-1767 (2009); and Schwartz and Ackerman, Eur. Heart J., 34:3109-3116 (2013)).

[0004] LQTS is caused by pathogenic variants in cardiac ion channels or their interacting regulatory proteins (Giudicessi et al., Trends Cardiovasc. Med., 28:453-464 (2018)). Type 1 LQTS (LQT1) is the most common form of LQTS, accounting for about 35% of cases (Ackerman et al., Heart Rhythm., 8:1308-1339 (2011)). LQT1 is caused by loss-of-function variants in KCNQ1, which encodes the α-subunit of the Kv7.1 voltage-gated potassium channel that is responsible for the slow delayed rectifier current (I_{Ks}) during repolarization of the cardiac action potential. Because the KCNQ1-encoded α-subunits tetramerize during Kv7.1 channel assembly, pathogenic missense variants commonly exhibit a dominant-negative effect due to interference with the wild-type (WT) subunits translated from the non-affected allele. Another common form of LQTS is LQT2, which accounts for about 30% of cases. Patients with LQT2 host loss-of-function mutations in the KCNH2-encoded I_{Kr} (Kv11.1) potassium channel that, like KCNQ1, plays a role in cardiac action potential duration (APD) (Tester et al., Heart Rhythm., 2(5):507-517 (2005); Giudicessi et al., Trends Cardiovasc. Med., 28:453-464 (2018); and Ackerman et al., Heart Rhythm., 8:1308-1339 (2011)). Pathogenic variants in KCNQ1 or KCNH2 that lead to a gain-of-function and an abnormal increase in I_{Ks} or I_{Kr} current density, respectively, can lead to short QT syndrome (SQTS). The third most common form of LQTS is LQT3, which accounts for about 10% of cases. Patients with LQT3 host gain-of-function mutations in the SCN5A-encoded I_{Na} (Nav1.5) sodium channel that also plays a role in the cardiac APD (Tester et al., J. Am. Coll. Cardiol. EP, 4:569-579 (2018)). Pathogenic variants in SCN5A that lead to a loss-of-function and a decrease in I_{Na} can cause Brugada syndrome (Wilde and Amin, J. Am. Coll. Cardiol. EP, 4:569-579 (2018)).

[0005] Current therapies for management of LQTS include beta-blockers, which provide a first line treatment, as well as more invasive therapies such as left cardiac sympathetic denervation (LCSD) or implantation of a cardioverter defibrillator (ICD). These, however, can have limitations including noncompliance, breakthrough cardiac events, or infection (Rohatgi et al., J. Am. Coll. Cardiol., 70:453-462 (2017); Priori et al., Heart Rhythm., 10:1932-1963 (2013); Al-Khatib et al., Heart Rhythm., 15:e190-e252 (2018); Schwartz et al., Circulation, 109:1826-1833 (2004); Bos et al., Circ. Arrhythm. Electrophysiol., 6:705-711 (2013); Schwartz et al., Circulation, 122:1272-1282 (2010); Homer et al., Heart Rhythm., 7:1616-1622 (2010); and Kleemann et al., Circulation, 115:2474-2480 (2007)), and they do not treat the underlying pathogenic substrate.

[0006] RNA interference (RNAi) technology, such as small interfering RNA (siRNA), utilizes endogenous gene silencing to knock down gene expression. Attempts to overcome dominant-negative KCNH2 variants in LQT2 have used allele-specific siRNAs to selectively knock down the mutant allele (Lu et al., Heart Rhythm, 10:128-136 (2013); and Matsa et al., Eur. Heart 1, 35:1078-1087 (2014)). The best possible outcome of this method would be haploinsufficiency, however. In addition, it would be necessary to engineer and validate a separate siRNA for each unique LQT2-causative variant, which would be impractical in KCNQ1, KCNH2, and SCN5A, as there are hundreds of LQT1-, LQT2-, and LQT3-causative variants (Landrum et al., Nucleic Acids Res., 46:D1062-1c:1 D1067 (2018)).

### SUMMARY

[0007] This document is based, at least in part, on the development of a dual-component “suppression-and-replacement” KCNQ1 (KCNQ1-SupRep) gene therapy approach for LQT1, in which a KCNQ1 shRNA is used to suppress expression of the endogenous KCNQ1 alleles and a codon-altered “shRNA-immune” copy of KCNQ1 is used for gene replacement. As described herein, the “KCNQ1-SupRep” system was successfully used to rescue the prolonged action potential duration in induced pluripotent stem cell (iPSC) cardiomyocytes derived from fibroblasts or PBMCs from four patients with unique LQT1-causative KCNQ1 variants. This document therefore describes successful preclinical hybrid gene therapy in LQT1, and demonstrates that the system provided herein is capable of complete rescue of KCNQ1 function. Theoretically, KCNQ1-SupRep is applicable to essentially any patient with LQT1, because it targets the whole KCNQ1 gene rather than specific mutations.

[0008] This document also is based, at least in part, on the development of a “suppression-and-replacement” KCNH2 (KCNH2-SupRep) gene therapy approach for LQT2, in which a KCNQ2 shRNA is used to suppress expression of the endogenous KCNH2 alleles and a codon-altered “shRNA-immune” copy of KCNH2 is used for gene replacement.

[0009] In addition, this document is based, at least in part, on the development of a “suppression-and-replacement” SCN5A (SCN5A-SupRep) gene therapy approach for LQT3, in which a SCN5A shRNA is used to suppress expression of the endogenous SCN5A alleles and a codon-altered “shRNA-immune” copy of SCN5A is used for gene replacement.

[0010] Having the ability to reduce the myocardium repolarization time (e.g., by shortening the APD) using the methods and materials described herein can allow clinicians and patients (e.g., LQTS patients) to achieve cardiac function that more closely resembles the function of a healthy heart, when compared to the function of an untreated LQTS patient's heart. In some cases, having the ability to reduce the myocardium repolarization time in LQTS patients using the methods and materials described herein can allow clinicians and patients to reduce LQTS symptoms and/or reverse LQTS progression. For example, delivery of a nucleic acid or virus construct provided herein to heart tissue can rescue cardiac defects and increase survival in LQTS patients.

[0011] In one aspect, this document features a nucleic acid construct. The nucleic acid construct can include (a) a first nucleotide sequence encoding an RNAi molecule capable of hybridizing to a target sequence encoding an endogenous KCNQ1 polypeptide within a cell and suppressing expression of the endogenous KCNQ1 polypeptide within the cell, and (b) a second nucleotide sequence encoding a KCNQ1 polypeptide, where the second nucleotide sequence includes a target sequence identical to the target sequence of the first nucleotide sequence with the exception that the target sequence of the second nucleotide sequence comprises 1 to 13 wobble position variants as compared to the target sequence of the first nucleotide sequence, and where the RNAi molecule does not suppress expression of the KCNQ1 polypeptide from the second nucleotide sequence within the cell. The first nucleotide sequence can include, consist essentially of, or consist of the sequence set forth in SEQ ID NO:12, SEQ ID NO:13, SEQ ID NO:15, or SEQ ID NO:36, and the second nucleotide sequence can include, consist essentially of, or consist of the sequence set forth in SEQ ID NO:9. The first nucleotide sequence can include, consist essentially of, or consist of the sequence set forth in SEQ ID NO:36 and the second nucleotide sequence can include, consist essentially of, or consist of the sequence set forth in SEQ ID NO:9. The first nucleotide sequence can be operably linked to a first promoter, and the second nucleotide sequence can be operably linked to a second promoter. The first and second promoters can be the same or can be different. The first promoter can be a U6 promoter, and the second promoter can be a cytomegalovirus immediate-early (CMV) promoter. The nucleic acid construct can further include a nucleotide sequence encoding a reporter. The reporter can be a fluorescent polypeptide. The nucleotide sequence encoding the reporter can be downstream of the second nucleotide sequence encoding the KCNQ1 polypeptide (e.g., a cDNA encoding the KCNQ1 polypeptide), and can be separated from the second nucleotide sequence by an internal ribozyme entry sequence (IRES) or P2A self-cleaving peptide sequence. The nucleic acid construct can be within a viral vector. The viral vector can be an adeno-associated virus (AAV) vector (e.g., an AAV serotype 9 vector or an AAV2/9 vector). The cell can be a cardiomyocyte.

[0012] In another aspect, this document features a virus particle containing a nucleic acid construct described herein (e.g., a nucleic acid construct of the preceding paragraph).

[0013] In another aspect, this document features a method for treating a mammal having a congenital cardiac disease. The method can include administering to the mammal a nucleic acid construct containing (a) a first nucleotide sequence encoding an RNAi molecule capable of hybridizing to a target sequence encoding an endogenous KCNQ1 polypeptide within a cell of the mammal and suppressing expression of the endogenous KCNQ1 polypeptide within the cell, and (b) a second nucleotide sequence encoding a KCNQ1 polypeptide, where the second nucleotide sequence comprises a target sequence identical to the target sequence of the first nucleotide sequence with the exception that the target sequence of the second nucleotide sequence comprises 1 to 13 wobble position variants as compared to the target sequence of the first nucleotide sequence, and where the RNAi molecule does not suppress expression of the KCNQ1 polypeptide from the second nucleotide sequence within the cell. The congenital cardiac disease can be long QT syndrome (LQTS) or short QT syndrome (SQTS). The congenital cardiac disease can be LQT1. The first nucleotide sequence can include, consist essentially of, or consist of the sequence set forth in SEQ ID NO:12, SEQ ID NO:13, SEQ ID NO:15, or SEQ ID NO:36, and the second nucleotide sequence can include, consist essentially of, or consist of the sequence set forth in SEQ ID NO:9. The first nucleotide sequence can include, consist essentially of, or consist of the sequence set forth in SEQ ID NO:36, and the second nucleotide sequence can include, consist essentially of, or consist of the sequence set forth in SEQ ID NO:9. The first nucleotide sequence can be operably linked to a first promoter, and the second nucleotide sequence can be operably linked to a second promoter. The first and second promoters can be the same or can be different. The first promoter can be a U6 promoter, and the second promoter can be a CMV promoter. The nucleic acid construct can further include a nucleotide sequence encoding a reporter. The reporter can be a fluorescent polypeptide. The nucleotide sequence encoding the reporter can be downstream of the second nucleotide sequence encoding the KCNQ1 polypeptide (e.g., a cDNA encoding the KCNQ1 polypeptide), and can be separated from the second nucleotide sequence by an IRES. The nucleic acid construct can be within a viral vector. The viral can be an AAV vector (e.g., an AAV serotype 9 vector or an AAV2/9 vector). The cell can be a cardiomyocyte.

[0014] In another aspect, this document features a method for reducing the action potential duration (APD) in cardiac cells within a mammal. The method can include administering to the mammal a nucleic acid construct containing (a) a first nucleotide sequence encoding an RNAi molecule capable of hybridizing to a target sequence encoding an endogenous KCNQ1 polypeptide within cardiac cells of the mammal and suppressing expression of the endogenous KCNQ1 polypeptide within the cardiac cells, and (b) a second nucleotide sequence encoding a KCNQ1 polypeptide, where the second nucleotide sequence comprises a target sequence identical to the target sequence of the first nucleotide sequence with the exception that the target sequence of the second nucleotide sequence comprises 1 to 13 wobble position variants as compared to the target sequence of the first nucleotide sequence, and where the RNAi molecule does not suppress expression of the KCNQ1 polypeptide from the second nucleotide sequence within the cell. The first nucleotide sequence can include, consist essentially of, or consist of the sequence set forth in SEQ ID NO:12, SEQ ID NO:13, SEQ ID NO:15, or SEQ ID NO:36, and the second nucleotide sequence can include, consist essentially of, or consist of the sequence set forth in SEQ ID NO:9. The first nucleotide sequence can include, consist essentially of, or consist of the sequence set forth in SEQ ID NO:36, and the second nucleotide sequence can include, consist essentially of, or consist of the sequence set forth in SEQ ID NO:9. The first nucleotide sequence can be operably linked to a first promoter, and the second nucleotide sequence can be operably linked to a second promoter. The first and second promoters can be the same or can be different. The first promoter can be a U6 promoter, and the second promoter can be a CMV promoter. The nucleic acid construct can be within a viral vector. The viral vector can be an AAV vector (e.g., an AAV serotype 9 vector or an AAV2/9 vector).

[0015] In another aspect, this document features a method for reducing one or more symptoms of LQTS in a mammal. The method can include administering to the mammal a nucleic acid construct containing (a) a first nucleotide sequence encoding an RNAi molecule capable of hybridizing to a target sequence encoding an endogenous KCNQ1 polypeptide within a cell of the mammal and suppressing expression of the endogenous KCNQ1 polypeptide within the cell, and (b) a second nucleotide sequence encoding a KCNQ1 polypeptide, where the second nucleotide sequence comprises a target sequence identical to the target sequence of the first nucleotide sequence with the exception that the target sequence of the second nucleotide sequence comprises 1 to 13 wobble position variants as compared to the target sequence of the first nucleotide sequence, and where the RNAi molecule does not suppress expression of the KCNQ1 polypeptide from the second nucleotide sequence within the cell. The LQTS can be LQT1. The first nucleotide sequence can include, consist essentially of, or consist of the sequence set forth in SEQ ID NO:12, SEQ ID NO:13, SEQ ID NO:15, or SEQ ID NO:36, and the second nucleotide sequence can include, consist essentially of, or consist of the sequence set forth in SEQ ID NO:9. The first nucleotide sequence can include, consist essentially of, or consist of the sequence set forth in SEQ ID NO:36, and the second nucleotide sequence can include, consist essentially of, or consist of the sequence set forth in SEQ ID NO:9. The first nucleotide sequence can be operably linked to a first promoter, and the second nucleotide sequence can be operably linked to a second promoter. The first and second promoters can be the same or can be different. The first promoter can be a U6 promoter, and the second promoter can be a CMV promoter. The nucleic acid construct can be within a viral vector. The viral vector can be an AAV vector (e.g., an AAV serotype 9 vector or an AAV2/9 vector). The cell can be a cardiomyocyte.

[0016] In another aspect, this document features a nucleic acid construct that can include (a) a first nucleotide sequence encoding an RNAi molecule capable of hybridizing to a target sequence encoding an endogenous KCNH2 polypeptide within a cell and suppressing expression of the endogenous KCNH2 polypeptide within the cell, and (b) a second nucleotide sequence encoding a KCNH2 polypeptide, where the second nucleotide sequence comprises a target sequence identical to the target sequence of the first nucleotide sequence with the exception that the target sequence of the second nucleotide sequence comprises 1 to 13 wobble position variants as compared to the target sequence of the first nucleotide sequence, and where the RNAi molecule does not suppress expression of the KCNH2 polypeptide from the second nucleotide sequence within the cell. The first nucleotide sequence can include, consist essentially of, or consist of the sequence set forth in SEQ ID NO:27, and the second nucleotide sequence can include, consist essentially of, or consist of the sequence set forth in SEQ ID NO:29. The first nucleotide sequence can be operably linked to a first promoter, and the second nucleotide sequence can be operably linked to a second promoter. The first and second promoters can be the same or can be different. The first promoter can be a U6 promoter, and the second promoter can be a CMV promoter. The nucleic acid construct can further include a nucleotide sequence encoding a reporter. The reporter can be a fluorescent polypeptide. The nucleotide sequence encoding the reporter can be downstream of the second nucleotide sequence encoding the KCNH2 polypeptide (e.g., a cDNA encoding the KCNH2 polypeptide), and can be separated from the second nucleotide sequence by an IRES or P2A self-cleaving peptide sequence. The nucleic acid construct can be within a viral vector. The viral vector can be an AAV vector (e.g., an AAV serotype 9 vector or an AAV2/9 vector). The cell can be a cardiomyocyte.

[0017] In another aspect, this document features a virus particle containing a nucleic acid construct described herein (e.g., a nucleic acid construct described in the preceding paragraph).

[0018] In still another aspect, this document features a method for treating a mammal having a congenital cardiac disease. The method can include administering to the mammal a nucleic acid construct containing (a) a first nucleotide sequence encoding an RNAi molecule capable of hybridizing to a target sequence encoding an endogenous KCNH2 polypeptide within a cell of the mammal and suppressing expression of the endogenous KCNH2 polypeptide within the cell, and (b) a second nucleotide sequence encoding a KCNH2 polypeptide, where the second nucleotide sequence comprises a target sequence identical to the target sequence of the first nucleotide sequence with the exception that the target sequence of the second nucleotide sequence comprises 1 to 13 wobble position variants as compared to the target sequence of the first nucleotide sequence, and where the RNAi molecule does not suppress expression of the KCNH2 polypeptide from the second nucleotide sequence within the cell. The congenital cardiac disease can be LQTS or SQTS. The congenital cardiac disease can be LQT2. The first nucleotide sequence can include, consist essentially of, or consist of the sequence set forth in SEQ ID NO:27, and the second nucleotide sequence can include, consist essentially of, or consist of the sequence set forth in SEQ ID NO:29. The first nucleotide sequence can be operably linked to a first promoter, and the second nucleotide sequence can be operably linked to a second promoter. The first and second promoters can be the same or can be different. The first promoter can be a U6 promoter, and the second promoter can be a CMV promoter. The nucleic acid construct can further include a nucleotide sequence encoding a reporter. The reporter can be a fluorescent polypeptide. The nucleotide sequence encoding the reporter can be downstream of the second nucleotide sequence encoding the KCNH2 polypeptide (e.g., a cDNA encoding the KCNH2 polypeptide), and can be separated from the second nucleotide sequence by an IRES. The nucleic acid construct can be within a viral vector. The viral vector can be an AAV vector (e.g., an AAV serotype 9 vector or an AAV2/9 vector). The cell can be a cardiomyocyte.

[0019] In another aspect, this document features a method for reducing the APD in cardiac cells within a mammal. The method can include administering to the mammal a nucleic acid construct containing (a) a first nucleotide sequence encoding an RNAi molecule capable of hybridizing to a target sequence encoding an endogenous KCNH2 polypeptide within cardiac cells of the mammal and suppressing expression of the endogenous KCNH2 polypeptide within the cardiac cells, and (b) a second nucleotide sequence encoding a KCNH2 polypeptide, where the second nucleotide sequence comprises a target sequence identical to the target sequence of the first nucleotide sequence with the exception that the target sequence of the second nucleotide sequence comprises 1 to 13 wobble position variants as compared to the target sequence of the first nucleotide sequence, and where the RNAi molecule does not suppress expression of the KCNH2 polypeptide from the second nucleotide sequence within the cell. The first nucleotide sequence can include, consist essentially of, or consist of the sequence set forth in SEQ ID NO:27, and the second nucleotide sequence can include, consist essentially of, or consist of the sequence set forth in SEQ ID NO:29. The first nucleotide sequence can be operably linked to a first promoter, and the second nucleotide sequence can be operably linked to a second promoter. The first and second promoters can be the same or can be different. The first promoter can be a U6 promoter, and the second promoter can be a CMV promoter. The nucleic acid construct can be within a viral vector. The viral vector can be an AAV vector (e.g., an AAV serotype 9 vector or an AAV2/9 vector).

[0020] In yet another aspect, this document features a method for reducing one or more symptoms of LQTS in a mammal. The method can include administering to the mammal a nucleic acid construct containing (a) a first nucleotide sequence encoding an RNAi molecule capable of hybridizing to a target sequence encoding an endogenous KCNH2 polypeptide within a cell of the mammal and suppressing expression of the endogenous KCNH2 polypeptide within the cell, and (b) a second nucleotide sequence encoding a KCNH2 polypeptide, where the second nucleotide sequence comprises a target sequence identical to the target sequence of the first nucleotide sequence with the exception that the target sequence of the second nucleotide sequence comprises 1 to 13 wobble position variants as compared to the target sequence of the first nucleotide sequence, and where the RNAi molecule does not suppress expression of the KCNH2 polypeptide from the second nucleotide sequence within the cell. The LQTS can be LQT2. The first nucleotide sequence can include, consist essentially of, or consist of the sequence set forth in SEQ ID NO:27, and the second nucleotide sequence can include, consist essentially of, or consist of the sequence set forth in SEQ ID NO:29. The first nucleotide sequence can be operably linked to a first promoter, and the second nucleotide sequence can be operably linked to a second promoter. The first and second promoters can be the same or can be different. The first promoter can be a U6 promoter, and the second promoter can be a CMV promoter. The nucleic acid construct can be within a viral vector. The viral vector can be an AAV vector (e.g., an AAV serotype 9 vector or an AAV2/9 vector). The cell can be a cardiomyocyte.

[0021] In another aspect, this document features a nucleic acid construct for treating a congenital heart disease caused by an endogenous cardiac polypeptide containing one or more mutations causative of the congenital heart disease, where the construct can include (a) a first nucleotide sequence encoding an RNAi molecule capable of hybridizing to a target sequence encoding the endogenous cardiac polypeptide within a cell and suppressing expression of the endogenous cardiac polypeptide within the cell, and (b) a second nucleotide sequence encoding a replacement version of the endogenous cardiac polypeptide that lacks the one or more mutations causative of the congenital heart disease, wherein the second nucleotide sequence comprises a target sequence identical to the target sequence of the first nucleotide sequence with the exception that the target sequence of the second nucleotide sequence comprises 1 to 13 wobble position variants as compared to the target sequence of the first nucleotide sequence, and wherein the RNAi molecule does not suppress expression of the replacement version of the endogenous cardiac polypeptide that lacks the one or more mutations causative of the congenital heart disease from the second nucleotide sequence within the cell. The first nucleotide sequence can be operably linked to a first promoter and the second nucleotide sequence can be operably linked to a second promoter. The first and second promoters can be the same, or the first and second promoters can be different. The first promoter can be a U6 promoter and the second promoter can be a CMV promoter. The nucleic acid construct can further include a nucleotide sequence encoding a reporter. The reporter can be a fluorescent polypeptide. The nucleotide sequence encoding the reporter can be downstream of the second nucleotide sequence encoding the cDNA, and can be separated from the second nucleotide sequence by an IRES or P2A self-cleaving peptide sequence. The nucleic acid construct can be within a viral vector. The viral vector can be an AAV vector (e.g., an AAV serotype 9 vector or an AAV2/9 vector). The cell can be a cardiomyocyte.

[0022] In another aspect, this document features a virus particle containing the nucleic acid construct described herein (e.g., a nucleic acid construct described in the preceding paragraph).

[0023] In still another aspect, this document features a method for treating a mammal having a congenital cardiac disease. The method can include administering to the mammal a nucleic acid construct containing (a) a first nucleotide sequence encoding an RNAi molecule capable of hybridizing to a target sequence encoding the endogenous cardiac polypeptide within a cell and suppressing expression of the endogenous cardiac polypeptide within the cell, and (b) a second nucleotide sequence encoding a replacement version of the endogenous cardiac polypeptide that lacks the one or more mutations causative of the congenital heart disease, wherein the second nucleotide sequence comprises a target sequence identical to the target sequence of the first nucleotide sequence with the exception that the target sequence of the second nucleotide sequence comprises 1 to 13 wobble position variants as compared to the target sequence of the first nucleotide sequence, and wherein the RNAi molecule does not suppress expression of the replacement version of the endogenous cardiac polypeptide that lacks the one or more mutations causative of the congenital heart disease from the second nucleotide sequence within the cell. The first nucleotide sequence can be operably linked to a first promoter and the second nucleotide sequence can be operably linked to a second promoter. The first and second promoters can be the same, or the first and second promoters can be different. The first promoter can be a U6 promoter and the second promoter can be a CMV promoter. The nucleic acid construct can further include a nucleotide sequence encoding a reporter. The reporter can be a fluorescent polypeptide. The nucleotide sequence encoding the reporter can be downstream of the second nucleotide sequence encoding the cDNA, and can be separated from the second nucleotide sequence by an IRES. The nucleic acid construct can be within a viral vector. The viral vector can be an AAV vector (e.g., an AAV serotype 9 vector or an AAV2/9 vector). The cell can be a cardiomyocyte.

[0024] Unless otherwise defined, all technical and scientific terms used herein have the same meaning as commonly understood by one of ordinary skill in the art to which this invention pertains. Although methods and materials similar or equivalent to those described herein can be used to practice the invention, suitable methods and materials are described below. All publications, patent applications, patents, and other references mentioned herein are incorporated by reference in their entirety. In case of conflict, the present specification, including definitions, will control. In addition, the materials, methods, and examples are illustrative only and not intended to be limiting.

[0025] The details of one or more embodiments of the invention are set forth in the accompanying drawings and the description below. Other features, objects, and advantages of the invention will be apparent from the description and drawings, and from the claims.

### DESCRIPTION OF DRAWINGS

[0026] FIG. 1A is a diagram of an exemplary KCNQ1-P2A AAV construct, and FIG. 1B shows the DNA sequence (SEQ ID NO:1029) for the construct. FIG. 1C shows a KCNQ1 target sequence (sh#5; SEQ ID NO:102), a corresponding shIMM KCNQ1 sequence (SEQ ID NO:103), a wild type KCNQ1 nucleotide sequence (SEQ ID NO:1030, with the sh#5 sequence underlined), a corresponding shIMM KCNQ1 nucleotide sequence (SEQ ID NO:1031, with the shIMM sequence underlined), and a KCNQ1 amino acid sequence (SEQ ID NO:1032).

[0027] FIG. 2A is a diagram of an exemplary KCNH2-P2A AAV construct, and FIG. 2B shows the DNA sequence (SEQ ID NO:1033) for the construct. The encoded AmpR amino acid sequence (SEQ ID NO:2784) also is shown. FIG. 2C shows a KCNH2 target sequence (RAB_sh#4; SEQ ID NO:27), a corresponding shIMM KCNH2 sequence (SEQ ID NO:29), a wild type KCNH2 nucleotide sequence (SEQ ID NO:1034, with the RAB_sh#4 sequence underlined), a corresponding shIMM KCNH2 nucleotide sequence (SEQ ID NO:1035, with the shIMM sequence underlined), and a KCNH2 amino acid sequence (SEQ ID NO:1036).

[0028] FIG. 3A is a diagram of an exemplary SCN5A-P2A Lenti construct, and FIG. 3B shows the DNA sequence (SEQ ID NO:1041) for the construct. FIG. 3C shows a SCN5A target sequence (sh#4; SEQ ID NO:30), a corresponding shIMM SCN5A sequence (SEQ ID NO:32), a wild type SCN5A nucleotide sequence (SEQ ID NO:1042, with the sh#5 sequence underlined), a corresponding shIMM SCN5A nucleotide sequence (SEQ ID NO:1043, with the shIMM sequence underlined), and a SCN5A amino acid sequence (SEQ ID NO:1044).

[0029] FIG. 4A is a diagram of an exemplary PKP2-P2A AAV construct, and FIG. 4B shows the DNA sequence (SEQ ID NO:1037) for the construct. FIG. 4C shows a PKP2 target sequence (sh#36; SEQ ID NO:52), a corresponding shIMM PKP2 sequence (SEQ ID NO:993), a wild type PKP2 nucleotide sequence (SEQ ID NO:1038, with the sh#5 sequence underlined), a corresponding shIMM PKP2 nucleotide sequence (SEQ ID NO:1039, with the shIMM sequence underlined), and a PKP2 amino acid sequence (SEQ ID NO:1040).

[0030] FIGS. 5A-5C show results obtained from experiments used to test KCNQ1 shRNAs for the KCNQ1-SupRep vector. TSA201 cells were co-transfected with KCNQ1-WT and various KCNQ1 shRNAs or a non-targeting scrambled shRNA control (shCT). FIG. 5A includes a graph (top) plotting KCNQ1 expression for cells co-transfected with four commercial shRNAs (sh#1-4), normalized to GAPDH, measured by qRT-PCR. An image of a representative western blot of KCNQ1 with cofilin housekeeping control also is shown (bottom). FIG. 5B is a graph plotting ImageJ quantification of western blot relative pixel density. KCNQ1 sh#4 was selected for the final KCNQ1-SupRep gene therapy vector, and is referred to as shKCNQ1 in the further studies described herein. Results and representative images were obtained from three independent experiments (defined as three identical repeats of each experiment conducted from start to finish on separate weeks with one biological replicate per treatment group per run). Graphs show mean±S.D. One-way ANOVA with post-hoc Tukey's test for multiple comparisons also was used. *p<0.05. FIG. 5C is a graph plotting knockdown of KCNQ1 in TSA201 cells co-transfected with various custom shRNAs (sh#5-sh#8), normalized to GAPDH, determined using qPCR.

[0031] FIGS. 6A and 6B depict the design for the KCNQ1 suppression-replacement (KCNQ1-SupRep) vector. FIG. 6A shows a sequence alignment of the target sequence portion of shKCNQ1 (SEQ ID NO:7) to KCNQ1-WT cDNA (SEQ ID NO:8) (top) and “shRNA-immune” KCNQ1 (KCNQ1-shIMM, bottom) (SEQ ID NO:9), which includes wobble base synonymous variants (underlined). The amino acid sequence shown is KCNQ1 p.V458-P469 (c.1372-1407, NM_000218.2) (SEQ ID NO:10). FIG. 6B is a schematic of representative KCNQ1-SupRep vector maps. (U6) U6 promoter; (CMV) cytomegalovirus promoter; (MHC) alpha-myosin heavy chain promoter, (MLC) myosin light chain 2 promoter, (TnC) cardiac troponin C promoter, (TnT) cardiac troponin T promoter, (E) calsequestrin-2 cardiomyocyte-specific transcriptional cis-regulatory enhancer motif, (IRES) internal ribosome entry site; and (CFP) cyan fluorescent protein.

[0032] FIGS. 7A and 7B show that shKCNQ1 knocks down KCNQ1-WT but not KCNQ1-shIMM in TSA201 cells co-transfected with KCNQ1-WT or KCNQ1-shIMM and shCT, shKCNQ1, or KCNQ1-SupRep. FIG. 7A is a graph (top) plotting relative KCNQ1 expression normalized to GAPDH measured by allele-specific qRT-PCR quantifying KCNQ1-WT (white) and KCNQ1-shIMM (grey). Results were confirmed with western blotting (bottom) for KCNQ1 with cofilin as housekeeping control. FIG. 7B is a graph plotting ImageJ quantification of western blot pixel density. Results and representative images were obtained from three independent experiments (defined as three identical repeats of each experiment conducted from start to finish on separate weeks with one biological replicate per treatment group per run). Both graphs show mean±S.D. For relative KCNQ1, one-way ANOVA with post-hoc Tukey's test for multiple comparisons was used in both FIG. 7A and FIG. 7B. For the sample treated with KCNQ1-SupRep in FIG. 7A, an unpaired 2-tailed student's t-test was used to compare the proportion of KCNQ1-WT compared to KCNQ1-shIMM (vertical bracket). *p<0.05.

[0033] FIG. 8 is a graph plotting relative KCNQ1 levels, indicating that suppression and replacement of KCNQ1-WT by shKCNQ1 and KCNQ1-SupRep was dose-dependent. TSA201 cells were co-transfected with 100 fmol KCNQ1-WT and a range (0-300 fmol) of shCT, shKCNQ1, or KCNQ1-SupRep. KCNQ1 expression was measured by allele-specific qRT-PCR and normalized to GAPDH. Markers represent the total KCNQ1. For KCNQ1-SupRep treatment when both KCNQ1-WT and -shIMM were present simultaneously, the allele-specific proportions of KCNQ1-WT (light grey shading) and KCNQ1-shIMM (dark grey shading) are shown.

[0034] FIG. 9 is a graph plotting relative KCNQ1 levels during activation of the two components of KCNQ1-SupRep showing that both shKCNQ1 and KCNQ1-shIMM activate at essentially the same rate. TSA201 cells were co-transfected with 100 fmol KCNQ1-WT and 100 fmol of shCT, shKCNQ1, KCNQ1-shIMM, or KCNQ1-SupRep and RNA harvested at different time points from 0 hours to 72 hours. KCNQ1 expression was measured by allele-specific qRT-PCR and normalized to GAPDH. Markers represent the total KCNQ1. For KCNQ1-SupRep treatment when both KCNQ1-WT and -shIMM were present simultaneously, the allele-specific proportion of KCNQ1-WT (light grey shading) and KCNQ1-shIMM (dark grey shading) are shown. Cells treated with KCNQ1-WT and shCT have nearly identical total KCNQ1 compared to cells treated with KCNQ1-WT and KCNQ1-SupRep, however in KCNQ1-SupRep, the proportion of KCNQ1-WT (light grey shading) is strongly suppressed while the proportion of KCNQ1-shIMM (dark grey shading) becomes the predominant form of KCNQ1 present.

[0035] FIGS. 10A-10C show patch clamp analysis of I_{Ks} in TSA201 cells co-transfected with KCNQ1-WT, KCNQ1-shIMM, or KCNQ1-variants and the Kv7.1 beta-subunit, KCNE1. FIG. 10A shows representative voltage clamp I_{Ks} traces for the indicated constructs, determined from a holding potential of −80 mV and test potentials from −40 mV to +80 mV in 10 mV increments with 4s duration. KCNQ1-shIMM produced WT I_{Ks} current (top). KCNQ1-Y171X, KCNQ1-V254M, and KCNQ1-I567S produced no I_{Ks} current (bottom). FIG. 10B is a graph plotting peak current density in the transfected cells. Error bars represent standard error of the mean (S.E.M.). FIG. 10C is a graph plotting peak current density at the +80 mV depolarization step. Error bars represent standard deviation (S.D.). One-way ANOVA with post-hoc Tukey's test for multiple comparisons also was used. *p<0.05.

[0036] FIG. 11 is a series of representative images showing immunofluorescence of TSA201 cells transfected with KCNQ1-WT, KCNQ1-shIMM, or KCNQ1-variants. KCNQ1-shIMM and KCNQ1-WT both trafficked to the cell membrane. KCNQ1-Y171X resulted in a premature stop codon and no expressed protein, while KCNQ1-V254M correctly trafficked to the cell membrane. KCNQ1-I567S created detectable protein, although seemingly at a lower expression level consistent with qPCR and western blot results. DAPI was used to stain nuclei, KCNQ1 (green), and merge. Representative images were obtained from three independent experiments (defined as three identical repeats of this experiment conducted from start to finish on separate weeks with one biological replicate per treatment group per run). Scale bars=20 μm.

[0037] FIG. 12 includes a graph (top) and a western blot (bottom) showing that KCNQ1-SupRep knocked down LQT1 disease-causing KCNQ1 variants, including both nonsense and missense variants, and replaced the variants with KCNQ1-shIMM. TSA201 cells were co-transfected with KCNQ1-WT or KCNQ1-variants and shCT, shKCNQ1, or KCNQ1-SupRep. shKCNQ1 knocks down KCNQ1 in a variant-independent manner. KCNQ1-SupRep knocks down KCNQ1 variants via shKCNQ1 and expresses KCNQ1-shIMM, which is knockdown immune. The graph at the top of FIG. 12 demonstrates proportional expression of KCNQ1-WT/variants and KCNQ1-shIMM, detected using allele-specific qRT-PCR to measure KCNQ1-WT/variant (white) and KCNQ1-shIMM (gray). Overall KCNQ1 expression (not allele-specific) was validated by western blotting with cofilin as a housekeeping control (FIG. 12, bottom). Results and representative images were obtained from three independent experiments (defined as three identical repeats of each experiment conducted from start to finish on separate weeks with one biological replicate per treatment group per run). The graph shows mean±S.D. For relative KCNQ1, a separate one-way ANOVA with post-hoc Tukey's test for multiple comparisons was conducted for each KCNQ1 variant to compare the three treatments and avoid extraneous comparisons between variants. In samples treated with KCNQ1-SupRep, an unpaired two-tailed student's t-test was used to compare the proportion of KCNQ1-WT compared to KCNQ1-shIMM (vertical brackets). *p<0.05.

[0038] FIGS. 13A-13D show quality control of iPSCs derived from four patients with LQT1, an unrelated healthy control, and two CRISPR-Cas9 corrected isogenic control iPSCs generated from two of the LQT1 patient iPSCs (KCNQ1-V254M and KCNQ1-A344A/sp1). FIG. 13A shows Sanger sequencing confirmation of LQT1-causative KCNQ1 variants in iPSCs derived from patients with LQT1 (middle), from an unrelated healthy control (top), and from isogenic controls (bottom). FIGS. 13B-13D show representative quality control studies completed for all iPSC lines, including normal karyotype (FIG. 13B), bright field image of an iPSC colony with normal morphology (FIG. 13C), and immunofluorescence microscopy (FIG. 13D) for markers of pluripotency including DAPI nuclear stain, Tra-1-60 or SSEA-4, Nanog or Oct-4, and a merged image. Scale bars=2011M. (spl) splice; (*) silent variant introduced during CRISPR-Cas9 correction to prevent reintroduction of double-strand breaks after successful editing of the transfected target cell.

[0039] FIG. 14 includes representative images showing immunofluorescence of iPSC-CMs derived from a patient with KCNQ1-V254M mediated LQT1, one week after transduction with lentiviral shCT or KCNQ1-SupRep. The patient-derived iPSC-CMs were stained with three separate antibodies to demonstrate (1) the presence of cardiomyocytes (cardiac troponin T, CTNT), (2) transduction by lentivirus as indicated by the turboGFP reporter (GFP) in shCT or by the CFP reporter in KCNQ1-SupRep, and (3) the presence of KCNQ1 either endogenously or as the result of treatment with KCNQ1-SupRep. The results showed that high purity populations of cardiomyocytes were evenly transduced with lentiviral shCT or KCNQ1-SupRep. With shCT, there was weak staining for KCNQ1, but when cells were treated with KCNQ1-SupRep, KCNQ1 staining was bright, indicating robust expression. Cells were counterstained with DAPI for nuclear stain. The figure shows representative images of iPSC-CMs from one LQT1 variant (KCNQ1-V254M). Immunofluorescence results for iPSC-CMs derived from the unrelated control and other three LQT1 variants (KCNQ1-Y171X, -I567S, and -A344A/spl) are found in FIGS. 15A-15D. Scale bars 50 μm.

[0040] FIGS. 15A-15D show immunofluorescence images from the iPSC-CMs not shown in FIG. 14, including the unrelated control (FIG. 15A) and three LQT1 variants (KCNQ1-Y171X, -I567S, and -A344A/spl; FIGS. 15B, 15C, and 15D, respectively). Immunofluorescence images were acquired one week after transduction with lentiviral shCT or KCNQ1-SupRep. The patient-derived iPSC-CMs were stained with three separate antibodies to demonstrate (1) presence of cardiomyocytes (cardiac troponin T; CTNT), (2) transduction by lentivirus as indicated by the turboGFP reporter in shCT (GFP or CFP in KCNQ1-SupRep), and (3) the presence of KCNQ1, either endogenous or as the result of treatment with KCNQ1-SupRep. The results showed high purity populations of cardiomyocytes that were evenly transduced with lentiviral shCT or KCNQ1-SupRep. In shCT, there was weak staining for KCNQ1, but in treatment with KCNQ1-SupRep, KCNQ1 staining was bright and indicated robust expression. Cells were counterstained with DAPI for nuclear stain. Scale bars=50 μm.

[0041] FIGS. 16A and 16B show that action potential duration (APD) was shortened in LQT1 iPSC-CMs treated with lentivirus containing KCNQ1-SupRep compared to shCT. FIG. 16A includes a series of representative traces showing three consecutive FluoVolt™ voltage dye optical action potentials paced at 1 Hz for untreated, unrelated healthy control and KCNQ1-Y171X, KCNQ1-V254M, KCNQ14567S, and KCNQ1-A344A/spl iPSC-CMs treated with shCT or KCNQ1-SupRep. FIG. 16B includes a series of graphs plotting APD₉₀ and APD₅₀ values for untreated, unrelated healthy control and KCNQ1-Y171X, KCNQ1-V254M, KCNQ14567S, and KCNQ1-A344A/spl iPSC-CMs treated with shCT or KCNQ1-SupRep. Action potential trace videos were obtained for a 20 second duration at 50 fps with 1 Hz pacing. Regions of interest containing flashing cells were identified, and the changes in fluorescence intensity over time were measured to produce optical action potentials from which APD₉₀ and APD₅₀ values were determined. APD₉₀ and APD₅₀ values for all action potentials within a 20 second trace were averaged to produce a single data point. The total number of measurements (n) is shown. Box plots show median and interquartile range with whiskers extending to minimum and maximum values. Baseline APD₉₀ and APD₅₀ values were assessed by one-way ANOVA with post-hoc Dunnett's test comparing each KCNQ1 variant treated with shCT to the untreated, unrelated control (TABLE 5). APD shortening due to KCNQ1-SupRep compared to treatment with shCT was assessed by unpaired two-tailed student's t-tests at both the APD₉₀ and APD₅₀ levels separately for each variant. *p<0.0001.

[0042] FIGS. 17A and 17B show that CRISPR-Cas9 corrected isogenic controls serve as a marker for “perfect” correction of the cardiac APD. FluoVolt™ voltage dye measurement of the cardiac APD was conducted in isogenic control iPSC-CMs generated from two of the four LQT1 iPSCs (KCNQ1-V254M and KCNQ1-A344A/sp1). Data for treatment with shCT or KCNQ1-SupRep was shown here unchanged from FIGS. 16A and 16B. Both isogenic control iPSC-CMs had significantly shorter APD₉₀ and APD₅₀ than the LQT1 iPSC-CMs treated with shCT, which indicated that correction of the single pathogenic LQT1 variant in KCNQ1 was able to rescue the disease phenotype in vitro. As with the unrelated control, the isogenic controls were measured untreated as to provide the purest signal for a normal APD. Treatment of LQT1 iPSC-CMs with KCNQ1-SupRep resulted in APD shortening, although the degree of shortening was variable. For KCNQ1-V254M, KCNQ1-SupRep undercorrected the prolonged APD₉₀ and overcorrected the APD₅₀. In KCNQ1-A344A/spl, ideal correction for the APD₉₀ was achieved and matched the isogenic control APD₉₀, but overcorrection of the APD₅₀ also occurred. FIG. 17A includes representative traces showing three consecutive action potentials paced at 1 Hz.

[0043] FIG. 17B includes a pair of graphs plotting APD₉₀ and APD₅₀ values for untreated, isogenic controls, and KCNQ1-V254M and KCNQ1-A344A/spl iPSC-CMs treated with shCT or KCNQ1-SupRep. Action potential trace videos were obtained for a 20 second duration at 50 fps with 1 Hz pacing. Regions of interest containing flashing cells were identified, and the changes in fluorescence intensity over time were measured to produce optical action potentials from which APD₉₀ and APD₅₀ values were determined. APD₉₀ and APD₅₀ values for all action potentials within a 20 second trace were averaged to produce a single data point. The total number of measurements (n) is shown. Box plots show median and interquartile range with whiskers extending to minimum and maximum values. A one-way ANOVA with post-hoc Tukey's test comparing all pairs for APD₉₀ and all pairs for APD₅₀ was used for each KCNQ1 variant tested. *p<0.0001, unless indicated by a specific p-value in the figure.

[0044] FIGS. 18A-18D show that use of iPSC-CM 3D organoid culture system can achieve results similar to those obtained in standard syncytial monolayer culture. To assess whether culture in 3D organoid or syncytial monolayer yields findings similar to monolayer culture, the iPSC-CMs from one of the four patients with LQT1 (KCNQ1-Y171X) were dissociated and plated into a round mold containing thick collagenous MATRIGEL® to form a spheroid. After 2-3 days, the iPSC-CMs formed a strong beating syncytium in 3D, and were used as the organoid model for this study. The organoids were treated with KCNQ1-SupRep, shCT, or left untreated as control. Seven days post viral transduction, the organoids were assayed by immunofluorescence or FluoVolt™ voltage dye. FIG. 18A is an image of a beating iPSC-CM organoid suspended in media in a 24-well culture plate, with a zoomed in image shown in the inset. FIG. 18B includes representative images of organoids that were fixed, cryosectioned, and stained for immunofluorescence using the cardiomyocyte marker cardiac troponin T (CTNT; top) and the lentiviral transduction marker as indicated by the turboGFP reporter in shCT (GFP; middle) or by the CFP reporter in KCNQ1-SupRep (bottom). FIG. 18C is a representative trace of FluoVolt™ voltage dye in the untreated LQT1 organoid or the LQT1 organoid treated with KCNQ1-SupRep. FIG. 18D is a graph plotting overall APD₉₀ and APD₅₀ values for untreated and KCNQ1-SupRep treated organoids from KCNQ1-Y171X iPSC-CMs. *p<0.0001.

[0045] FIGS. 19A-19F provide a summary of the LQT1 and LQT2 transgenic rabbit phenotype. Shown in FIG. 19A are schematic representations of pathogenic variants (KCNQ1-Y315S and KCNH2-G628S) in the KCNQ1-encoded potassium channel subunit (left) and KCNH2-encoded potassium channel subunit polypeptides (right) and the transgenic constructs (bottom). FIG. 19B includes representative electrocardiogram traces showing the differences in QT interval between wild-type (WT), LQT1, and LQT2 rabbits. FIG. 19C is a bar graph showing the significant difference in QT interval duration between WT and LQT1 or LQT2 rabbits. FIG. 19D shows the spontaneous torsades de pointes (TdP) in a oestradiol-treated LQT2 rabbit initiated by short-long-short sequence. FIG. 19E includes representative cellular cardiac action potential traces that demonstrated prolonged action potential durations in LQT1 and LQT2 rabbit cardiomyocytes compared with cardiomyocytes from WT rabbits. FIG. 19F shows IV-curves of I_{Ks} and I_{Kr} currents in cardiomyocytes isolated form WT, LQT1, and LQT2 rabbit hearts, indicating the loss of I_{Ks} in LQT1 rabbits and loss of I_{Kr} in LQT2 rabbits.

[0046] FIGS. 20A-20C demonstrate generation and confirmation of KCNH2-G604S and KCNH2-N633S iPSC lines. FIG. 20A is an image of a karyotype, showing that each clone had a normal karyotype for their respective sex. FIG. 20B is an image showing phase-contrast light images of iPSC colonies from each of the patient cell lines used for the study. FIG. 20C contains representative Sanger sequencing chromatograms for the patent cell lines. The boxes indicate the relevant codon, and the stars indicate the exact nucleotide of interest. Scale bars=50 μm.

[0047] FIG. 21 is an image showing immunocytochemistry for p.G604S clone #1, p.G604S clone #2, p.N633S clone #1, and p.N633S clone #2. Each of the respective clones for each line was demonstrated to express Nanog and SSEA4 pluripotency markers. Scale bars=20 μm.

[0048] FIG. 22 is a graph plotting knockdown of KCNH2 in TSA201 cells with various shRNAs, determined using qPCR.

[0049] FIG. 23 is a graph plotting the results of FluoVolt™ studies using CRISPR-Cas9 corrected isogenic controls as a marker for correction of cardiac APD in N633 S iPSC-CMs and isogenic control iPSC-CMs generated from LQT2 iPSCs (N633S). APD_{90B} and APD_{50B} values were determined for isogenic control treated with shCT, and for KCNH2-N633S variant treated with shCT or KCNH2-SupRep. Action potential trace videos were obtained for a 20 second duration at 50 fps with 1 Hz pacing. Regions of interest containing flashing cells were identified, and the changes in fluorescence intensity over time were measured to produce optical action potentials from which APD₉₀ and APD₅₀ values were determined. APD₉₀ and APD₅₀ values for all action potentials within a 20 second trace were averaged to produce a single data point, and Bazett corrected APD_{90B} and APD_{50B} values were plotted. The total number of measurements (n) and medians (horizontal black lines) are indicated. A one-way ANOVA with post-hoc Tukey's test comparing all pairs for APD_{90B} and all pairs for APD_{50B} was used.

[0050] FIG. 24 is a graph plotting the results of FluoVolt™ voltage dye measurement of cardiac APD in N633S iPSC-CMs and isogenic control iPSC-CMs generated from LQT2 iPSCs (N633S). APD_{90B} and APD_{50B} values for the untreated (UT) KCNH2-N633S variant, the SupRep treated isogenic control, and the untreated (UT) isogenic control are shown. Action potential trace videos were obtained for a 20 second duration at 50 fps with 1 Hz pacing. Regions of interest containing flashing cells were identified, and the changes in fluorescence intensity over time were measured to produce optical action potentials from which APD₉₀ and APD₅₀ values were determined. APD₉₀ and APD₅₀ values for all action potentials within a 20 second trace were averaged to produce a single data point. Bazett corrected APD_{90B} and APD_{50B} values are shown, and the total number of measurements (n) is indicated. Dot plots show median (horizontal black line). A one-way ANOVA with post-hoc Tukey's test comparing all pairs for APD_{90B} and all pairs for APD_{50B} was used.

[0051] FIG. 25 is a graph plotting the results of FluoVolt′ voltage dye measurement of cardiac APD in G604S iPSC-CMs. APD₉₀ and APD₅₀ values for KCNH2-G604S variant treated with shCT and KCNH2-G604S variant treated with KCNH2-SupRep are shown. Treatment of LQT2 iPSC-CMs with KCNH2-SupRep results in significant APD₉₀ and APD₅₀ shortening compared to those treated with shCT. Action potential trace videos were obtained for a 20 second duration at 50 fps with 1 Hz pacing. Regions of interest containing flashing cells were identified, and the changes in fluorescence intensity over time were measured to produce optical action potentials from which APD₉₀ and APD₅₀ values were determined. APD₉₀ and APD₅₀ values for all action potentials within a 20 second trace were averaged to produce a single data point. The total number of measurements (n) is shown. Dot plots show median (horizontal black line). A student's t-test comparing all pairs for APD_{90B} and all pairs for APD_{50B} was used.

[0052] FIG. 26 is a graph plotting APD₉₀ and APD₅₀ values for the KCNH2-G604S variant treated with shCT (1), and KCNH2-SupRep (2), or CRISPR-Cas9 corrected isogenic control treated with shCT (3). Treatment of the KCNH2-G604S iPSC-CMs with KCNH2-SupRep resulted in significant APD₉₀ shortening compared to treatment with shCT. Action potential trace videos were obtained for 20 second durations at 50 fps with 1 Hz pacing. Regions of interest containing flashing cells were identified, and the changes in fluorescence intensity over time were measured to produce optical action potentials from which APD₉₀ and APD₅₀ values were determined. APD₉₀ and APD₅₀ values for all action potentials within a 20 second trace were averaged to produce a single data point. The total number of measurements (n) is shown. The graph also shows the medians (horizontal black lines). A one-way ANOVA with post-hoc Tukey's test was used to compare all pairs for APD₉₀ and all pairs for APD₅₀.

[0053] FIG. 27 is a graph plotting APD₉₀ and APD₅₀ values for the KCNH2-G628S variant treated with shCT (1), KCNH2-SupRep (2), or CRISPR-Cas9 corrected isogenic control treated with shCT (3). Treatment of the KCNH2-G628S iPSC-CMs with KCNH2-SupRep resulted in significant APD₉₀ shortening compared to treatment with shCT. Action potential trace videos were obtained for 20 second durations at 50 fps with 1 Hz pacing. Regions of interest containing flashing cells were identified, and the changes in fluorescence intensity over time were measured to produce optical action potentials from which APD₉₀ values were determined. APD₉₀ values for all action potentials within a 20 second trace were averaged to produce a single data point. The total number of measurements (n) is shown. The graph also shows the medians (horizontal black lines). A one-way ANOVA with post-hoc Tukey's test was used to compare all pairs for APD₉₀.

[0054] FIGS. 28A and 28B show that KCNH2-SupRep knocked down LQT2 disease-causing KCNH2 missense variants and replaced them with KCNH2-shIMM. TSA201 cells were co-transfected with KCNH2-WT or KCNH2-variants and shCT, shKCNH2, or KCNH2-SupRep. shKCNH2 knocked down KCNH2 in a variant-independent manner. FIG. 28A is a graph plotting proportional expression of KCNH2-WT/variants and KCNH2-shIMM, which were detected using allele-specific qRT-PCR to measure KCNH2-WT/variant (white) and KCNH2-shIMM (grey). FIG. 28B is an image of a western blot showing overall KCNH2 expression (not allele-specific), with GAPDH as a housekeeping control.

[0055] FIGS. 29A and 29B show that shKCNH2 knocked down KCNH2-WT but not KCNH2-shIMM in TSA201 cells co-transfected with KCNH2-WT or KCNH2-shIMM and shCT, shKCNH2, or KCNH2-SupRep. FIG. 29A is a graph plotting relative KCNH2 expression normalized to GAPDH, as measured by allele-specific qRT-PCR to quantify KCNH2-WT (white) and KCNH2-shIMM (grey). Results were confirmed with western blotting (FIG. 29B) for KCNH2, with GAPDH as a housekeeping control.

[0056] FIGS. 30A-30D show that KCNH2-AAV-P2A CTnC-EGFP did not generate KCNH2 current in heterologous TSA 201 cells. FIG. 30A is a plot of representative whole cell I_{Kr} tracings from TSA201 cells expressing KCNH2-WT with KCNE2, determined from a holding potential of −80 mV and testing potentials from −40 mV to +60 mV in 10 mV increments with a 3 second duration. FIG. 30B shows representative whole cell outward tracings from TSA201 cells expressing KCNH2-AAV-P2A CTnC-EGFP, determined from a holding potential of −80 mV and testing potentials from −40 mV to +60 mV in 10 mV increments with a 3 second duration. FIG. 30C is a graph plotting current-voltage relationship for KCNH2-pIRES2-EGFP with KCNE2-pIRES2-dsRed2 (n=9) and KCNH2-AAV-P2A CTnC-EGFP (n=8). All values represent mean±SEM. FIG. 30D is a graph plotting peak current density at +10 mV for KCNH2-pIRES2-EGFP with KCNE2-pIRES2-dsRed2 (n=9) and KCNH2-AAV-P2A CTnC-EGFP (n=8). All values represent mean±SEM.

[0057] FIGS. 31A-31E show that KCNH2-AAV-P2A CTnC-EGFP generated E-4031 sensitive outward current in H9C2 cells. FIG. 31A includes representative whole cell outward current tracings from empty H9C2 cells (upper panel), H9C2 cells expressing KCNH2-AAV-P2A CTnC-EGFP before E-4031 (middle panel), and H9C2 cells expressing KCNH2-AAV-P2A CTnC-EGFP after E-4031 (lower panel) determined from a holding potential of −80 mV and testing potentials from −40 mV to +60 mV in 10 mV increments with a 3 second duration. FIG. 31B is a graph plotting current-voltage relationship for outward current from empty H9C2 cells and H9C2 cells expressing KCNH2-AAV-P2A CTnC-EGFP (n=9). All values represent mean±SEM. FIG. 31C is a graph plotting peak current density at +60 mV from empty H9C2 cells and H9C2 cells expressing KCNH2-AAV-P2A CTnC-EGFP (n=9). All values represent mean±SEM. FIG. 31D is a graph plotting current-voltage relationship for H9C2 cells expressing KCNH2-AAV-P2A CTnC-EGFP, before and after E-4031 (n=6). All values represent mean±SEM. FIG. 31E is a graph plotting peak current density at +60 mV from H9C2 cells expressing KCNH2-AAV-P2A CTnC-EGFP, before and after E-4031 (n=6). All values represent mean±SEM.

[0058] FIG. 32 is a graph plotting APD₉₀ and APD₅₀ values for the KCNH2-N588K variant treated with shCT (1), KCNH2-SupRep (2), or isogenic control treated with shCT (3). Treatment of SQT1 iPSC-CMs with KCNH2-SupRep resulted in significant APD₉₀ prolongation compared to treatment with shCT. Action potential trace videos were obtained for 20 second durations at 50 fps with 1 Hz pacing. Regions of interest containing flashing cells were identified, and the changes in fluorescence intensity over time were measured to produce optical action potentials from which APD₉₀ and APD₅₀ values were determined. APD₉₀ and APD₅₀ values for all action potentials within a 20 second trace were averaged to produce a single data point. The total number of measurements (n) is shown. The graph also shows medians (horizontal black line). A one-way ANOVA with post-hoc Tukey's test was used to compare all pairs for APD₉₀ and APD₅₀ was used.

[0059] FIGS. 33A-33D show quality control for iPSCs derived from a patient with the SCN5A-F1760C variant. FIG. 33A is a bright field image of an iPSC colony with normal morphology. FIG. 33B shows the Sanger sequencing confirmation (SEQ ID NO:1047) of the LQT3-causing SCN5A-F1760C variant in iPSCs derived from the patient. FIG. 33C is an image showing a normal karyotype for the iPSC line generated from the patient's blood sample. FIG. 33D includes images of immunofluorescence microscopy for markers of pluripotency, including DAPI nuclear stain, Tra-1-60 or SSEA-4, Nanog or Oct-4, and a merged image.

[0060] FIG. 34 is a graph plotting knockdown of SCN5A in TSA201 cells with various shRNAs, determined using qPCR.

[0061] FIG. 35 is a schematic showing representative SCN5A-SupRep vector maps.

[0062] (CMV) cytomegalovirus promoter; (MCS) multiple cloning site; (U6) U6 promoter; (ChlorR) chloramphenicol resistance gene; (Ori) origin of replication; (WPRE) Woodchuck Hepatitis Virus Posttranscriptional Regulatory Element; (GFP) green fluorescent protein; (P2A) a member of 2A self-cleaving peptide family; (HA) tag derived from the human influenza hemagglutinin molecule corresponding to amino acids 98-106.

[0063] FIGS. 36A and 36B show that the APD was shortened in LQT3 SCN5A-F1760C iPSC-CMs treated with lentivirus containing SCN5A-SupRep, compared to untreated cells. FIG. 36A includes representative traces showing five consecutive FLUOVOLT™ voltage dye optical action potentials paced at 1 Hz for untreated and SCN5A-SupRep treated SCN5A-F1760C iPSC-CMs. FIG. 36B is a graph plotting APD₉₀ and APD₅₀ values for untreated and SCN5A-SupRep treated SCN5A-F1760C iPSC-CMs. Action potential trace videos were obtained for a 20 second duration at 50 fps with 1 Hz pacing. Regions of interest containing flashing cells were identified, and the changes in fluorescence intensity over time were measured to produce optical action potentials from which APD₉₀ and APD₅₀ values were determined. APD₉₀ and APD₅₀ values for all action potentials within a 20 second trace were averaged to produce a single data point.

[0064] FIG. 37 is a graph plotting knockdown of MYH7 in TSA201 cells with various shRNAs, determined using qPCR.

[0065] FIG. 38 is a graph plotting knockdown of PKP2 in TSA201 cells with various shRNAs, determined by qRT-PCR.

[0066] FIGS. 39A-39D show quality control of iPSCs derived from a patient with a PKP2-c2146-1G>C variant. FIG. 39A includes bright field images of iPSC colonies with normal morphology. FIG. 39B shows Sanger sequencing confirmation of the ACM-causative PKP2-c2146-1G>C variant in iPSCs derived from the patient with ACM. FIG. 39C shows a normal karyotype for clones from the iPSC line generated from the patient's blood sample. FIG. 39D includes images of immunofluorescence microscopy for DAPI nuclear stain and markers of pluripotency, including Tra-1-60 or SSEA-4, Nanog or Oct-4, and a merged image.

[0067] FIG. 40 includes a series of graphs showing that calcium transient duration (CTD) and decay were shortened in ACM iPSC-CMs treated with lentivirus containing PKP2-SupRep compared to untreated cells. Given that PKP2-mediated ACM-associated arrhythmic events are often associated with exertion, calcium handling measurements were performed under both baseline and following treatment with the adrenergic agonist, isoproterenol (Iso). Trace videos were obtained for a 20 second duration at 50 fps with 0.5 Hz pacing. Regions of interest containing flashing cells were identified, and the changes in fluorescence intensity over time were measured to produce calcium transient traces from which the values were determined. All values of calcium transients within a second trace were averaged to produce a single data point for all the parameters except for calcium amplitude, where only the first value was taken for analysis.

[0068] FIG. 41 is a graph plotting knockdown of DSP in TSA201 cells with various shRNAs, determined by qRT-PCR.

[0069] FIG. 42 is a graph plotting knockdown of MYBPC3 in TSA201 cells with various shRNAs, determined by qRT-PCR.

[0070] FIG. 43 is a graph plotting knockdown of RBM20 in TSA201 cells with various shRNAs, determined by qRT-PCR.

[0071] FIG. 44 is a graph plotting knockdown of CACNA1C in TSA201 cells with various shRNAs, determined by qRT-PCR.

[0072] FIG. 45 is a graph plotting knockdown of CALM1 in TSA201 cells with various shRNAs, determined by qRT-PCR.

[0073] FIG. 46 is a graph plotting knockdown of CALM2 in TSA201 cells with various shRNAs, determined by qRT-PCR.

[0074] FIG. 47 is a graph plotting knockdown of CALM3 in TSA201 cells with various shRNAs, determined by qRT-PCR.

[0075] FIG. 48 is a graph plotting knockdown of KCNJ2 in TSA201 cells with various shRNAs, determined by qRT-PCR.

[0076] FIG. 49 is a graph plotting knockdown of CASQ2 in TSA201 cells with various shRNAs, determined by qRT-PCR.

[0077] FIG. 50 is a graph plotting knockdown of DSG2 in TSA201 cells with various shRNAs, determined by qRT-PCR.

[0078] FIG. 51 is a graph plotting knockdown of TNNT2 in TSA201 cells with various shRNAs, determined by qRT-PCR.

[0079] FIG. 52 is a graph plotting knockdown of TPM1 in TSA201 cells with various shRNAs, determined by qRT-PCR.

[0080] FIG. 53 is a graph plotting knockdown of LMNA in TSA201 cells with various shRNAs, determined by qRT-PCR.

[0081] FIG. 54 is a graph plotting knockdown of PLN in TSA201 cells with various shRNAs, determined by qRT-PCR.

### DETAILED DESCRIPTION

[0082] This document provides methods and materials for treating a mammal having a congenital disease (e.g., a congenital heart disease such as a LQTS or, more specifically, LQT1, LQT2, or LQT3) through suppression of endogenous causative allele(s) and replacement with/expression of a non-mutant (non-causative), non-suppressed coding sequence. In general, the methods and materials provided herein involve the use of nucleic acid constructs that contain one or more suppressive components (e.g., an RNAi nucleic acid such as a shRNA) designed to suppress the expression of one or more disease-associated alleles (or their transcribed RNAs) within one or more types of cells (e.g., cardiomyocytes) present within a mammal (e.g., the heart of a mammal such as a human having LQTS, or more specifically, LQT1, LQT2, or LQT3), in combination with one or more corrective components (e.g., a nucleic acid encoding a version of the disease-associated allele that encodes a wild type polypeptide and is immune to the suppressive component). The methods and materials provided herein can be used to reduce one or more symptoms or effects of the disease caused by allele(s) targeted by the suppressive component.

[0083] In some cases, this document provides a suppression-and-replacement (SupRep) nucleic acid that can be used to treat a mammal having a congenital disorder. Disorders that can be treated according to the methods provided herein include, without limitation, LQTS (e.g., LQT1, LQT2, LQT3, LQT4, LQT5, LQT6, LQT7, LQT8, LQT9, LQT10, LQT11, LQT12, LQT13, LQT14, LQT15, LQT16, or LQT17), Brugada syndrome (BrS), catecholaminergic polymorphic ventricular tachycardia (CPVT), arrhythmogenic cardiomyopathy (ACM), hypertrophic cardiomyopathy (HCM), dilated cardiomyopathy (DCM), SQTS, Timothy syndrome, left ventricular non-compaction cardiomyopathy (LVNC), skeletal myopathy, Andersen-Tawil syndrome (ATS), familial hypercholesterolemia (FH), cardiomyopathies, atrial fibrillation, and Triadin knockout syndrome (TKOS).

[0084] The nucleic acids provided herein include two main components—a suppressive gene therapy component that can suppress the expression of a selected disease-associated allele, and a corrective gene therapy component encoding a corrected version of the selected disease-associated allele that is immune to the suppressive gene therapy component.

[0085] The suppressive component can be, for example, an RNAi nucleic acid such as a shRNA, siRNA, or a micro RNA (miRNA). The suppressive component can have any appropriate length. For example, the suppressive component can be from about 10 to 40 nucleotides in length (e.g., from about 10 to about 20, from about 15 to about 30, from about 18 to about 22, from about 20 to about 30, or from about 30 to about 40 nucleotides in length).

[0086] The suppressive component can be designed to target a region of a disease-associated allele that does not contain the pathogenic mutation(s) (e.g., LQTS-causative mutations) or other genetic polymorphisms. In this manner, the suppressive component can reduce the expression of numerous versions of the endogenous alleles, including wild type alleles, alleles containing disease-associated mutations, or alleles containing other polymorphisms that are not causative of the disorder to be treated.

[0087] In some cases, the suppressive component can be designed to target a region of a disease-associated allele that contains one or more pathogenic mutations (e.g., one or more LQTS-causative mutations) or other genetic polymorphisms.

[0088] The corrective component can be a nucleic acid that encodes a corrected version of the disease-associated allele that lacks the pathogenic mutation(s), and may encode a wild type polypeptide. The corrective component also contains base substitutions as compared to the endogenous version of the targeted gene, such that the corrective component is immune to (e.g., not suppressed by) the suppressive gene therapy component. For example, the region of the corrective component that would otherwise be targeted by the suppressive component can include from about 1 to about 13 (e.g., from about 1 to about 3, from about 2 to about 4, from about 3 to about 5, from about 4 to about 6, from about 5 to about 7, from about 6 to about 8, from about 7 to about 9, from about 8 to about 10, from about 9 to about 11, from about 10 to about 12, or from about 11 to about 13) wobble base synonymous variants that do not change the amino acid sequence encoded by the corrective component, as compared to the corresponding wild type sequence. In some cases, the region of the corrective component that would otherwise be targeted by the suppressive component can include 1, 2, 3, 4, 5, 6, 7, 8, 9, 10, 11, 12, or 13 wobble base synonymous variants that do not change the amino acid sequence encoded by the corrective component, as compared to the corresponding wild type sequence (e.g., wild type, non-pathogenic sequence). Due to the presence of the synonymous variants, expression of the suppressive component will not reduce the expression of the corrective component.

[0089] Other suppressive component/corrective component combinations also can be used. For example, in some cases, the suppressive component can be designed to target the 5′ untranslated region (UTR) or 3′ UTR, since the corrective cDNA does not contain the UTRs but endogenous transcription of mRNA does contain the UTRs. In such cases, the corrective component does not need to contain silent variants since the suppressive component (e.g., RNAi) is targeted to a UTR. In some cases, the suppressive component can target a sequence near the 5′ or 3′ end of the coding sequence, and the corrective component can include a truncated cDNA that does not contain the sequence targeted by the suppressive component.

[0090] In some cases, the corrective component may encode a polypeptide that is not 100% identical to the wild type polypeptide at the amino acid sequence level, but has activity at a level sufficient to treat the disorder. Amino acid substitutions can be made, in some cases, by selecting substitutions that do not differ significantly in their effect on maintaining (a) the structure of the peptide backbone in the area of the substitution, (b) the charge or hydrophobicity of the molecule at particular sites, or (c) the bulk of the side chain. For example, naturally occurring residues can be divided into groups based on side-chain properties: (1) hydrophobic amino acids (methionine, alanine, valine, leucine, and isoleucine); (2) neutral hydrophilic amino acids (cysteine, serine, and threonine); (3) acidic amino acids (aspartic acid and glutamic acid); (4) basic amino acids (asparagine, glutamine, histidine, lysine, and arginine); (5) amino acids that influence chain orientation (glycine and proline); and (6) aromatic amino acids (tryptophan, tyrosine, and phenylalanine). Substitutions made within these groups can be considered conservative substitutions. Non-limiting examples of conservative substitutions that can be encoded within a corrective component of a SupRep construct provided herein include, without limitation, substitution of valine for alanine, lysine for arginine, glutamine for asparagine, glutamic acid for aspartic acid, serine for cysteine, asparagine for glutamine, aspartic acid for glutamic acid, proline for glycine, arginine for histidine, leucine for isoleucine, isoleucine for leucine, arginine for lysine, leucine for methionine, leucine for phenyalanine, glycine for proline, threonine for serine, serine for threonine, tyrosine for tryptophan, phenylalanine for tyrosine, and/or leucine for valine.

[0091] In some cases, a SupRep construct provided herein also can encode or contain a reporter. Any appropriate reporter can be used. In some cases, for example, a fluorescent reporter (e.g., green fluorescent protein, red fluorescent protein, or yellow fluorescent protein) can be used. In some cases, a non-fluorescent tag can be included. Any appropriate non-fluorescent tag can be used, including, without limitation, hemagglutinin, FLAG® tag, His6, and V5.

[0092] A non-limiting example of a SupRep construct provided herein is a SupRep KCNQ1 gene therapy vector that can be used for treating of mammals having LQT1. As described in the Examples herein, the therapeutic efficacy of the SupRep KCNQ1 gene therapy vector is supported by results obtained using two in vitro model systems. Again, the SupRep strategy has two components that occur in tandem. First, for KCNQ1 and LQT1, suppression of both endogenous KCNQ1 alleles (the WT allele and the LQT1 mutant-containing allele) occurs via a KCNQ1 shRNA. The second component involves replacement of KCNQ1 via expression of a shRNA-immune (shIMM) KCNQ1 cDNA that contains synonymous variants at the wobble base of each codon within the shRNA's binding sequence. As noted above, these synonymous variants did not alter the WT amino acid sequence, but did prevent knock down (KD) by the shRNA—thereby rendering it “immune” to the shRNA. KCNQ1-SupRep can be mutation-independent, eliminating the need to design multiple RNAi since the shRNA targets the gene itself rather than discrete mutations.

[0093] Nucleic acid molecules encoding a suppressive component and a corrective component can be produced by techniques including, without limitation, common molecular cloning, polymerase chain reaction (PCR), chemical nucleic acid synthesis techniques, and combinations of such techniques. For example, PCR can be used with oligonucleotide primers designed to amplify nucleic acid (e.g., genomic DNA or RNA) encoding a selected polypeptide (e.g., KCNQ1).

[0094] This document also provides methods for using the SupRep constructs described herein to treat a mammal identified as having a congenital disorder. As described in the Examples herein, for example, a KCNQ1-SupRep gene therapy vector was generated, and its ability to suppress and replace KCNQ1 was validated via heterologous expression in TSA201 cells. In addition, the LQT1 disease phenotype was rescued by shortening of the cardiac action potential duration (APD) in an in vitro cardiac model using patient-specific, induced pluripotent stem cell-derived cardiomyocytes (iPSC-CMs) generated from four patients with distinct LQT1-causative variants. Further, the studies described herein demonstrated that the KCNQ1-SupRep gene therapy approximated a “therapeutic cure,” in terms of APD normalization, when compared to the gold standard of a patient's own corrected isogenic control cells.

[0095] Any appropriate mammal can be treated as described herein. For example, mammals including, without limitation, humans, monkeys, dogs, cats, cows, horses, pigs, sheep, rabbits, rats, and mice having a congenital disorder (e.g., a congenital heart disorder such as a LQTS, or more specifically LQT1) can be treated as described herein. In some cases, a mammal (e.g., a human) having a congenital disease (e.g., a congenital cardiac disease such as a LQTS, or more specifically LQT1) can be treated by administering a SupRep nucleic acid construct to the mammal (e.g., to the heart muscle of the mammal) in a manner that suppresses expression of endogenous disease-associated alleles and provides a replacement wild type cDNA (or a cDNA that does not include disease-associated polymorphisms). A mammal can be identified as having a congenital disorder using any appropriate diagnostic technique. Non-limiting examples include, without limitation, genetic screening for one or more disease-associated alleles and assessment of organ (e.g., heart) function deficits (e.g., by electrocardiogram, echocardiogram, exercise stress test, and/or lidocaine challenge).

[0096] In some cases, the mammal can have LQT1 or SQTS, and the gene to be suppressed and replaced can be KCNQ1. An example of a KCNQ1 construct is shown in FIGS. 1A and 1B. An exemplary KCNQ1 sequence is set forth in NCBI RefSeq accession number NM_000218 (e.g., version NM_000218.2 or NM_00218.3) (FIG. 1C). A KCNQ1 polypeptide can, in some cases, have the amino acid sequence set forth in NCBI RefSeq accession number NP_000209 (e.g., version NP_000209.2) (FIG. 1C).

[0097] Examples of shRNA sequences and corresponding shIMM sequences targeted to KCNQ1 are set forth in TABLE 1A.

TABLE 1A
Representative KCNQ1 shRNA and
shIMM sequences

| | SEQ | | SEQ |
|---|---|---|---|
| shRNA Sequence | ID | shIMM Sequence | ID |
| GGCTGGAAATGCTTC | 54 | GGGTGGAAGTGTTTT | 55 |
| GTTTACCACT | | GTATATCATT | |
| GCTGGAAATGCTTCG | 56 | GGTGGAAGTGTTTTG | 57 |
| TTTACCACTT | | TATATCATTT | |
| GGAAATGCTTCGTTT | 58 | GGAAGTGTTTTGTAT | 59 |
| ACCACT | | ATCATT | |
| GGAAATGCTTCGTTT | 60 | GGAAGTGTTTTGTAT | 61 |
| ACCA | | ATCA | |
| GAAATGCTTCGTTTA | 62 | GAAGTGTTTTGTATA | 63 |
| CCACTT | | TCATTT | |
| TTCCTCATCGTCCTG | 64 | TTTCTGATTGTGCTC | 65 |
| GTCTGCCTCATCTT | | GTGTGTCTGATTTT | |
| GCGTGCTGTCCACCA | 66 | GTGTCCTCTCGACGA | 67 |
| TCGAGCAGTATGCC | | TTGAACAATACGCG | |
| GTCCACCATCGAGCA | 68 | CTCGACGATTGAACA | 69 |
| GTAT | | ATAC | |
| TCCACCATCGAGCAG | 70 | TCGACGATTGAACAA | 71 |
| TATGCC | | TACGCG | |
| GTGTTCTTCGGGACG | 72 | GTCTTTTTTGGCACC | 73 |
| GAGTACGTGGTCCG | | GAATATGTCGTGCG | |
| CTCATCGTGGTCGTG | 74 | CTGATTGTCGTGGTC | 75 |
| GCCTCCATGGTGGT | | GCGTCGATGGTCGT | |
| GGGCAGGTGTTTGCC | 76 | GGCCAAGTCTTCGCG | 77 |
| ACGTCGGCCATCAG | | ACCTCCGCGATTAG | |
| ACCGCCAGGGAGGCA | 78 | ATCGGCAAGGTGGGA | 79 |
| CCTGGAGGCTCCTG | | CGTGGAGACTGCTC | |
| TGGTCTTCATCCACC | 80 | TCGTGTTTATTCATC | 81 |
| GCCAGGAGCTGATA | | GGCAAGAACTCATT | |
| TGGTCTTCATCCACC | 82 | TCGTGTTTATTCATC | 83 |
| GCCAGG | | GGCAAG | |
| GCTGATAACCACCCT | 84 | ACTCATTACGACGCT | 85 |
| GTACAT | | CTATAT | |
| ACCACCCTGTACATC | 86 | ACGACGCTCTATATT | 87 |
| GGCTTCCTGGGCCT | | GGGTTTCTCGGGCT | |
| ACCACCCTGTACATC | 88 | ACGACGCTCTATATT | 89 |
| GGCTTC | | GGGTTT | |
| CTGGCTGAGAAGGAC | 90 | CTCGCAGAAAAAGAT | 91 |
| GCGGTGAACGAGTC | | GCCGTCAATGAATC | |
| CTGTGGTGGGGGGTG | 92 | CTCTGGTGGGGCGTC | 93 |
| GTCACAGTCACCAC | | GTGACTGTGACGAC | |
| AGACCATCGCCTCCT | 94 | AAACGATTGCGTCGT | 95 |
| GCTTCTCTGTCTTT | | GTTTTTCAGTGTTC | |
| AGCAGAAGCAGAGGC | 96 | AACAAAAACAAAGAC | 97 |
| AGAAGCACTTCAAC | | AAAAACATTTTAAT | |
| GAAGCAGAGGCAGAA | 98 | AAAACAAAGACAAAA | 99 |
| GCACTT | | ACATTT | |
| CCCAAACCCAAGAAG | 100 | CCGAAGCCGAAAAAA | 101 |
| TCTGTGGTGGTAAA | | TCAGTCGTCGTTAA | |
| GTTCAAGCTGGACAA | 102 | ATTTAAACTCGATAA | 103 |
| AGACAATGGGGTGA | | GGATAACGGCGTCA | |
| GTTCAAGCTGGACAA | 104 | ATTTAAACTCGATAA | 105 |
| AGACAA | | GGATAA | |
| TGGACAAAGACAATG | 106 | TCGATAAGGATAACG | 107 |
| GGGTGA | | GCGTCA | |
| GAGAGAAGATGCTCA | 108 | GTGAAAAAATGCTGA | 109 |
| CAGT | | CTGT | |
| GACAGTTCTGTAAGG | 110 | GATAGCTCAGTTAGA | 111 |
| AAGAGCCCAACACT | | AAAAGTCCTACTCT | |
| GTTCTGTAAGGAAGA | 112 | GCTCAGTTAGAAAAA | 113 |
| GCCCAACACT | | GTCCTACTCT | |
| GCCCAACACTGCTGG | 114 | GTCCTACTCTCCTCG | 115 |
| AAGTGAGCATGCCC | | AGGTCAGTATGCCG | |
| GCCCAACACTGCTGG | 116 | GTCCTACTCTCCTCG | 117 |
| AAGTGA | | AGGTCA | |
| TGAGAACCAACAGCT | 118 | TGAGGACGAATAGTT | 119 |
| TCGCCGAGGACCTG | | TTGCGGAAGATCTC | |
| GGGCCACCATTAAGG | 120 | GCGCGACGATAAAAG | 121 |
| TCAT | | TGAT | |
| GGCCACCATTAAGGT | 122 | CGCGACGATAAAAGT | 123 |
| CATT | | GATA | |
| CGCATGCAGTACTTT | 124 | CGGATGCAATATTTC | 125 |
| GTGGCCAAGAAGAA | | GTCGCGAAAAAAAA | |
| AAGAAATTCCAGCAA | 126 | AAAAAGTTTCAACAG | 127 |
| GCGCGGAAGCCTTA | | GCCCGCAAACCATA | |
| AGGGCCACCTCAACC | 128 | AAGGGCATCTGAATC | 129 |
| TCATGGTGCGCATC | | TGATGGTCCGGATT | |
| GTCCATTGGGAAGCC | 130 | ATCGATAGGCAAACC | 131 |
| CTCACTGTTCATCT | | GTCTCTCTTTATTT | |
| GGAAGCCCTCACTGT | 132 | GCAAACCGTCTCTCT | 133 |
| TCATCT | | TTATTT | |
| GCCTGAACCGAGTAG | 134 | GGCTCAATCGTGTTG | 135 |
| AAGA | | AGGA | |
| GAAGACAAGGTGACG | 136 | GAGGATAAAGTCACC | 137 |
| CAGCTGGACCAGAG | | CAACTCGATCAAAG | |

[0098] In some cases, the mammal can have LQT2 or SQTS, and the gene to be suppressed and replaced can be KCNH2. An example of a KCNH2 construct is shown in FIGS. 2A and 2B. An exemplary KCNH2 sequence is set forth in NCBI RefSeq accession number NM_000238 (e.g., version NM_000238.4; FIG. 2C). A KCNH2 polypeptide can, in some cases, have the amino acid sequence set forth in NCBI RefSeq accession number NP_000229 (e.g., version NP_000229.1; FIG. 2C).

[0099] Examples of shRNA sequences and corresponding shIMM sequences targeted to KCNH2 are set forth in TABLE 1B.

TABLE 1B
Representative KCNH2 shRNA
and shIMM sequences

| | SEQ | | SEQ |
|---|---|---|---|
| shRNA Sequence | ID | shIMM Sequence | ID |
| CACCTTCCTGGACAC | 138 | TACGTTTCTCGATAC | 139 |
| CATCATCCGCAAGT | | GATTATTCGGAAAT | |
| CACCTTCCTGGACAC | 140 | TACGTTTCTCGATAC | 141 |
| CATCAT | | GATTAT | |
| TGGACACCATCATCC | 142 | TCGATACGATTATTC | 143 |
| GCAAGT | | GGAAAT | |
| TGGGCGCCGAGGAGC | 144 | TCGGGGCGGAAGAAC | 145 |
| GCAAAGTGGAAATC | | GGAAGGTCGAGATT | |
| GATGGGAGCTGCTTC | 146 | GACGGCAGTTGTTTT | 147 |
| CTATGT | | CTTTGC | |
| GGAGCTGCTTCCTAT | 148 | GCAGTTGTTTTCTTT | 149 |
| GTCT | | GCCT | |
| GGGCTGTCATCATGT | 150 | GCGCAGTGATTATGT | 151 |
| TCAT | | TTAT | |
| GCTGTCATCATGTTC | 152 | GCAGTGATTATGTTT | 153 |
| ATCCTCAATT | | ATTCTGAACT | |
| TCGTGCGCTACCGCA | 154 | TGGTCCGGTATCGGA | 155 |
| CCATTAGCAAGATT | | CGATAAGTAAAATA | |
| ATCACCCTCAACTTT | 156 | ATTACGCTGAATTTC | 157 |
| GTGGACCTCAAGGG | | GTCGATCTGAAAGG | |
| GTGACCGTGAGATCA | 158 | GCGATCGAGAAATTA | 159 |
| TAGCACCTAAGATA | | TTGCTCCAAAAATT | |
| GATCATAGCACCTAA | 160 | AATTATTGCTCCAAA | 161 |
| GATAAA | | AATTAA | |
| GATCATAGCACCTAA | 162 | AATTATTGCTCCAAA | 163 |
| GATA | | AATT | |
| GAGCGAACCCACAAT | 164 | GAACGTACGCATAAC | 165 |
| GTCA | | GTGA | |
| GTGGGACTGGCTCAT | 166 | CTGGGATTGGCTGAT | 167 |
| CCTGCTGCTGGTCA | | TCTCCTCCTCGTGA | |
| GGTCATCTACACGGC | 168 | CGTGATTTATACCGC | 169 |
| TGTCTT | | AGTGTT | |
| GTGGACATCCTCATC | 170 | GTCGATATTCTGATT | 171 |
| AACT | | AATT | |
| GACATCCTCATCAAC | 172 | GATATTCTGATTAAT | 173 |
| TTCCGCACCACCTA | | TTTCGGACGACGTA | |
| GAAGCTGGATCGCTA | 174 | CAAACTCGACCGGTA | 175 |
| CTCAGA | | TTCTGA | |
| GAAGCTGGATCGCTA | 176 | CAAACTCGACCGGTA | 177 |
| CTCA | | TTCT | |
| GCCCCTCCATCAAGG | 178 | GGCCGTCGATTAAAG | 179 |
| ACAAGTATGT | | ATAAATACGT | |
| CTGACATCTGCCTGC | 180 | CAGATATTTGTCTCC | 181 |
| ACCTGAACCGCTCA | | ATCTCAATCGGTCT | |
| CTGACATCTGCCTGC | 182 | CAGATATTTGTCTCC | 183 |
| ACCTGAACCGCTCA | | ATCTCAATCGGTCT | |
| TGAAGTTCAAGACCA | 184 | TGAAATTTAAAACGA | 185 |
| CACATGCACCGCCA | | CTCACGCTCCCCCT | |
| CTTCTGGTCCAGCCT | 186 | TTTTTGGTCGAGTCT | 187 |
| GGAGATCACCTTCA | | CGAAATTACGTTTA | |
| CACGGAGCAGCCAGG | 27 | TACCGAACAACCTGG | 29 |
| GGAGGTGTCGGCCT | | CGAAGTCTCCGCGT | |
| CACGGAGCAGCCAGG | 188 | TACCGAACAACCTGG | 189 |
| GGAGGT | | CGAAGT | |
| AGCCAGGGGAGGTGT | 190 | AACCTGGCGAAGTCT | 191 |
| CGGCCT | | CCGCGT | |
| CTGCAGCTGCTACAG | 192 | CTCCAACTCCTTCAA | 193 |
| AGGCAGATGACGCT | | AGACAAATGACCCT | |
| CGACGCCTCTCCCTA | 194 | CGTCGGCTGTCGCTT | 195 |
| CCGGGCCAGCTGGG | | CCCGGGCAACTCGG | |
| CGACGCCTCTCCCTA | 196 | CGTCGGCTGTCGCTT | 197 |
| CCGGGCCAGCTGGG | | CCCGGGCAACTCGG | |

[0100] In some cases, the mammal can have LQT3 or BrS, and the gene to be suppressed and replaced can be SCN5A (which encodes sodium channel protein type 5 subunit alpha isoform b). An example of a SCN5A construct is shown in FIGS. 3A and 3B. An exemplary SCN5A sequence is set forth in NCBI RefSeq accession number NM_000335 (e.g., version NM_000335.5; FIG. 3C). A SCN5A polypeptide can, in some cases, have the amino acid sequence set forth in NCBI RefSeq accession number NP_000326 (e.g., version NP_000326.2; FIG. 3C).

[0101] Examples of shRNA sequences and corresponding shIMM sequences targeted to SCN5A are set forth in TABLE 1C.

TABLE 1C
Representative SCN5A shRNA
and shIMM sequences

| | SEQ | | SEQ |
|---|---|---|---|
| shRNA Sequence | ID | shIMM Sequence | ID |
| GGCAAACTTCCTATT | 198 | GGCTAATTTTCTTTT | 199 |
| ACCT | | GCCA | |
| GACCATCTTCCGGTT | 200 | AACGATTTTTCGCTT | 201 |
| CAGT | | TAGC | |
| GTTCAGTGCCACCAA | 202 | CTTTAGCGCGACGAA | 203 |
| CGCCTTGTAT | | TGCGTTATAC | |
| GGTTCACTCGCTCTT | 30 | CGTACATTCCCTGTT | 32 |
| CAACATGCTCATCA | | TAATATGCTGATTA | |
| GGTTCACTCGCTCTT | 204 | CGTACATTCCCTGTT | 205 |
| CAACAT | | TAATAT | |
| GTTCACTCGCTCTTC | 206 | GTACATTCCCTGTTT | 207 |
| AACATGCTCATCAT | | AATATGCTGATTAT | |
| GCTCTTCAACATGCT | 208 | CCTGTTTAATATGCT | 209 |
| CATCAT | | GATTAT | |
| GCTCTTCATGGGCAA | 210 | ACTGTTTATGGGGAA | 211 |
| CCTAAGGCACAAGT | | TCTTAGACATAAAT | |
| GGCAACCTAAGGCAC | 212 | GGGAATCTTAGACAT | 213 |
| AAGT | | AAAT | |
| GGAATCCCTGGACCT | 214 | GGAGTCGCTCGATCT | 215 |
| TTACCT | | ATATCT | |
| GGACCTTTACCTCAG | 216 | CGATCTATATCTGAG | 217 |
| TGAT | | CGAC | |
| GGGCCTTTCTTGCAC | 218 | GGGCGTTCCTAGCTC | 219 |
| TCTT | | TGTT | |
| GATCTTCTTCATGCT | 220 | GATTTTTTTTATGCT | 221 |
| TGTCAT | | AGTGAT | |
| GGAGGCCATGGAAAT | 222 | AGAAGCGATGGAGAT | 223 |
| GCTCAAGAAA | | GCTGAAAAAG | |
| GGCCATGGAAATGCT | 224 | AGCGATGGAGATGCT | 225 |
| CAAGAA | | GAAAAA | |
| GCCATGGAAATGCTC | 226 | GCGATGGAGATGCTG | 227 |
| AAGAAA | | AAAAAG | |
| GCCATGGAAATGCTC | 228 | GCGATGGAGATGCTG | 229 |
| AAGA | | AAAA | |
| GCCCCAGTAAACAGC | 230 | GCGCCTGTTAATAGT | 231 |
| CATGAGAGAA | | CACGAAAGGA | |
| GATGGTCCCAGAGCA | 232 | GACGGACCGAGGGCT | 233 |
| ATGAAT | | ATGAAC | |
| GTCCCAGAGCAATGA | 234 | GACCGAGGGCTATGA | 235 |
| ATCA | | ACCA | |
| GGAAGAGTTAGAGGA | 236 | CGAGGAATTGGAAGA | 237 |
| GTCTCGCCACAAGT | | ATCACGGCATAAAT | |
| GGAAGAGTTAGAGGA | 238 | CGAGGAATTGGAAGA | 239 |
| GTCT | | ATCA | |
| GTCCATCAAGCAGGG | 240 | GTCGATTAAACAAGG | 241 |
| AGTGAA | | TGTCAA | |
| GACCTCACCATCACT | 242 | GATCTGACGATTACA | 243 |
| ATGT | | ATGT | |
| GCGCTGGAGCACTAC | 244 | GCCCTCGAACATTAT | 245 |
| AACATGACAA | | AATATGACTA | |
| GCTGGAGCACTACAA | 246 | CCTCGAACATTATAA | 247 |
| CATGACAAGT | | TATGACTAGC | |
| GGAGCACTACAACAT | 248 | CGAACATTATAATAT | 249 |
| GACA | | GACT | |
| GAGCACTACAACATG | 250 | GAACATTATAATATG | 251 |
| ACAAGT | | ACTAGC | |
| GAGCACTACAACATG | 252 | GAACATTATAATATG | 253 |
| ACAA | | ACTA | |
| GCACTACAACATGAC | 254 | ACATTATAATATGAC | 255 |
| AAGT | | TAGC | |
| GACAAGTGAATTCGA | 256 | GACTAGCGAGTTTGA | 257 |
| GGAGAT | | AGAAAT | |
| GTCGGAAACCTGGTC | 258 | GTGGGTAATCTCGTG | 259 |
| TTCACA | | TTTACT | |
| GTCGGAAACCTGGTC | 260 | GTGGGTAATCTCGTG | 261 |
| TTCA | | TTTA | |
| GCTGGCACATGATGG | 262 | GGTGGCATATGATGG | 263 |
| ACTTCTTTCA | | ATTTTTTCCA | |
| GCTGGCACATGATGG | 264 | GGTGGCATATGATGG | 265 |
| ACTTCT | | ATTTTT | |
| GCTGGCACATGATGG | 266 | GGTGGCATATGATGG | 267 |
| ACTT | | ATTT | |
| GGCACATGATGGACT | 268 | GGCATATGATGGATT | 269 |
| TCTT | | TTTT | |
| GCACATGATGGACTT | 270 | GCATATGATGGATTT | 271 |
| CTTTCA | | TTTCCA | |
| GCACATGATGGACTT | 272 | GCATATGATGGATTT | 273 |
| CTTT | | TTTC | |
| GCCTGCTGGTCTTCT | 274 | GTCTCCTCGTGTTTT | 275 |
| TGCTTGTTAT | | TACTAGTAAT | |
| GCTGGTCTTCTTGCT | 276 | CCTCGTGTTTTTACT | 277 |
| TGTTAT | | AGTAAT | |
| GCCCCTGATGAGGAC | 278 | GCGCCAGACGAAGAT | 279 |
| AGAGAGATGAACAA | | AGGGAAATGAATAA | |
| GGAAGACCATCAAGG | 280 | GCAAAACGATTAAAG | 281 |
| TTCT | | TACT | |
| GCCTCATCTTCTGGC | 282 | GTCTGATTTTTTGGC | 283 |
| TCATCT | | TGATTT | |
| GCCAGTGTGAGTCCT | 284 | GTCAATGCGAATCGT | 285 |
| TGAACT | | TAAATT | |
| GCCCTTCTGCAGGTG | 286 | GCGCTACTCCAAGTC | 287 |
| GCAACATTTA | | GCTACTTTCA | |
| GCAGGTGGCAACATT | 288 | CCAAGTCGCTACTTT | 289 |
| TAAA | | CAAG | |
| GAAGAGCAGCCTCAG | 290 | GAGGAACAACCACAA | 291 |
| TGGGAATACA | | TGGGAGTATA | |
| GAGCAGCCTCAGTGG | 292 | GAACAACCACAATGG | 293 |
| GAATACAACCTCTA | | GAGTATAATCTGTA | |
| GCAGCCTCAGTGGGA | 294 | ACAACCACAATGGGA | 295 |
| ATACAACCTCTACA | | GTATAATCTGTATA | |
| GCAGCCTCAGTGGGA | 296 | ACAACCACAATGGGA | 297 |
| ATACAA | | GTATAA | |
| GCCTCAGTGGGAATA | 298 | ACCACAATGGGAGTA | 299 |
| CAACCTCTACATGT | | TAATCTGTATATGT | |
| GTGGGAATACAACCT | 300 | ATGGGAGTATAATCT | 301 |
| CTACAT | | GTATAT | |
| GGGAATACAACCTCT | 302 | GGGAGTATAATCTGT | 303 |
| ACATGT | | ATATGT | |
| GGGAATACAACCTCT | 304 | GGGAGTATAATCTGT | 305 |
| ACAT | | ATAT | |
| AAGTACTACAATGCC | 306 | AAATATTATAACGCG | 307 |
| ATGAAG | | ATGAAA | |
| GTACCAGGGCTTCAT | 308 | ATATCAAGGGTTTAT | 309 |
| ATTCGACATTGTGA | | TTTTGATATAGTCA | |
| GGGCTTCATATTCGA | 310 | AGGGTTTATTTTTGA | 311 |
| CATTGT | | TATAGT | |
| GGCTTCATATTCGAC | 312 | GGGTTTATTTTTGAT | 313 |
| ATTGTGACCA | | ATAGTCACGA | |
| GCTTCATATTCGACA | 314 | GGTTTATTTTTGATA | 315 |
| TTGTGA | | TAGTCA | |
| GCTTCATATTCGACA | 316 | GGTTTATTTTTGATA | 317 |
| TTGT | | TAGT | |
| GCTGCTGCTCTTCCT | 318 | CCTCCTCCTGTTTCT | 319 |
| CGTCATGTTCATCT | | GGTGATGTTTATTT | |
| GCTGCTCTTCCTCGT | 320 | CCTCCTGTTTCTGGT | 321 |
| CATGTTCATCTACT | | GATGTTTATTTATT | |
| GCTGCTCTTCCTCGT | 322 | CCTCCTGTTTCTGGT | 323 |
| CATGTT | | GATGTT | |
| GCTCTTCCTCGTCAT | 324 | CCTGTTTCTGGTGAT | 325 |
| GTTCAT | | GTTTAT | |
| GAGGCTGGCATCGAC | 326 | GAAGCAGGGATTGAT | 327 |
| GACATGTTCAACTT | | GATATGTTTAATTT | |
| GCTGGCATCGACGAC | 328 | GCAGGGATTGATGAT | 329 |
| ATGTTCAACT | | ATGTTTAATT | |
| GGCATCGACGACATG | 330 | GGGATTGATGATATG | 331 |
| TTCA | | TTTA | |
| GCATCGACGACATGT | 332 | GGATTGATGATATGT | 333 |
| TCAACT | | TTAATT | |
| GCATCGACGACATGT | 334 | GGATTGATGATATGT | 335 |
| TCAA | | TTAA | |
| GACGACATGTTCAAC | 336 | GATGATATGTTTAAT | 337 |
| TTCCAGACCT | | TTTCAAACGT | |
| GGGCATCCTCTTCTT | 338 | CGGGATTCTGTTTTT | 339 |
| CACCACCTACATCA | | TACGACGTATATTA | |
| GGCATCCTCTTCTTC | 340 | GGGATTCTGTTTTTT | 341 |
| ACCACCTACATCAT | | ACGACGTATATTAT | |
| GGCATCCTCTTCTTC | 342 | GGGATTCTGTTTTTT | 343 |
| ACCACCTACA | | ACGACGTATA | |
| GCATCCTCTTCTTCA | 344 | GGATTCTGTTTTTTA | 345 |
| CCACCTACAT | | CGACGTATAT | |
| GGTCTGACTACAGCC | 346 | GCTCAGATTATAGTC | 347 |
| ACAGTGAAGA | | ATAGCGAGGA | |
| GTCTGACTACAGCCA | 348 | CTCAGATTATAGTCA | 349 |
| CAGTGA | | TAGCGA | |

[0102] In some cases, the mammal can have HCM or DCM, and the gene to be suppressed and replaced can be MYH7 (which encodes myosin heavy chain 7). An exemplary MYH7 sequence is set forth in NCBI RefSeq accession number NM_000257 (e.g., version NM_000257.4). A MYH7 polypeptide can, in some cases, have the amino acid sequence set forth in NCBI RefSeq accession number NP_000248 (e.g., version NP_000248.2).

[0103] Examples of shRNA sequences and corresponding shIMM sequences targeted to MYH7 are set forth in TABLE 1D.

TABLE 1D
Representative MYH7 shRNA
and shIMM sequences

| | SEQ | | SEQ |
|---|---|---|---|
| shRNA Sequence | ID | shIMM Sequence | ID |
| GACCTCAAGAAGGAT | 350 | GATCTGAAAAAAGAC | 351 |
| GTCT | | GTGT | |
| GTGTCACCGTCAACC | 352 | GCGTGACGGTGAATC | 353 |
| CTTACA | | CATATA | |
| GTCACCGTCAACCCT | 354 | GTGACGGTGAATCCA | 355 |
| TACA | | TATA | |
| GTCAACACCAAGAGG | 356 | GTGAATACGAAAAGA | 357 |
| GTCATCCAGTACTT | | GTGATTCAATATTT | |
| GAGGGTCATCCAGTA | 358 | AAGAGTGATTCAATA | 359 |
| CTTT | | TTTC | |
| GCTGAAAGCAGAGAG | 33 | ACTCAAGGCTGAAAG | 35 |
| AGATTATCACATTT | | GGACTACCATATAT | |
| GGAGCTCATGGCCAC | 360 | AGAACTGATGGCGAC | 361 |
| TGATAA | | AGACAA | |
| GAGCTCATGGCCACT | 362 | GAACTGATGGCGACA | 363 |
| GATA | | GACA | |
| GGGCTTCACTTCAGA | 364 | CGGGTTTACATCTGA | 365 |
| GGAGAA | | AGAAAA | |
| GGCTTCACTTCAGAG | 366 | GGGTTTACATCTGAA | 367 |
| GAGAAA | | GAAAAG | |
| GGCTTCACTTCAGAG | 368 | GGGTTTACATCTGAA | 369 |
| GAGA | | GAAA | |
| GCTTCACTTCAGAGG | 370 | GGTTTACATCTGAAG | 371 |
| AGAA | | AAAA | |
| GGGCAGAATGTCCAG | 372 | GGCCAAAACGTGCAA | 373 |
| CAGGTGATAT | | CAAGTCATTT | |
| GGCAGAATGTCCAGC | 374 | GCCAAAACGTGCAAC | 375 |
| AGGTGATATA | | AAGTCATTTA | |
| GCAGAATGTCCAGCA | 376 | CCAAAACGTGCAACA | 377 |
| GGTGAT | | AGTCAT | |
| GAATGTCCAGCAGGT | 378 | AAACGTGCAACAAGT | 379 |
| GATATA | | CATTTA | |
| GAATGTCCAGCAGGT | 380 | AAACGTGCAACAAGT | 381 |
| GATA | | CATT | |
| GGCCAAGGCAGTGTA | 382 | CGCGAAAGCTGTCTA | 383 |
| TGAGAGGATGTTCA | | CGAAAGAATGTTTA | |
| GGCTGATGCGCCTAT | 384 | CGCAGACGCCCCAAT | 385 |
| TGAGAA | | AGAAAA | |
| GCTGATGCGCCTATT | 386 | GCAGACGCCCCAATA | 387 |
| GAGA | | GAAA | |
| GAAGGGCAAAGGCAA | 388 | AAAAGGGAAGGGGAA | 389 |
| GGCCAAGAAA | | AGCGAAAAAG | |
| GGCAAAGGCAAGGCC | 390 | GGGAAGGGGAAAGCG | 391 |
| AAGAAA | | AAAAAG | |
| GAGACTCCCTGCTGG | 392 | GGGATTCGCTCCTCG | 393 |
| TAAT | | TTAT | |
| GTCAAGAATTGGCCC | 394 | GTGAAAAACTGGCCG | 395 |
| TGGATGAAGCTCTA | | TGGATGAAACTGTA | |
| GGAGAGCATCATGGA | 396 | AGAAAGTATTATGGA | 397 |
| CCTGGAGAAT | | TCTCGAAAAC | |
| GTCCGTGCAGATCGA | 398 | CTCGGTCCAAATTGA | 399 |
| GATGAA | | AATGAA | |
| GTGCAGATCGAGATG | 400 | GTCCAAATTGAAATG | 401 |
| AACA | | AATA | |
| GCAGATCGAGATGAA | 402 | CCAAATTGAAATGAA | 403 |
| CAAGAA | | TAAAAA | |
| GAGCAGATCATCAAG | 404 | GAACAAATTATTAAA | 405 |
| GCCAAGGCTAACCT | | GCGAAAGCAAATCT | |
| GCCAAGGCTAACCTG | 406 | GCGAAAGCAAATCTC | 407 |
| GAGAAGATGT | | GAAAAAATGT | |
| GCTAACCTGGAGAAG | 408 | GCAAATCTCGAAAAA | 409 |
| ATGT | | ATGT | |
| GTGGAGGCTGTTAAT | 410 | GTCGAAGCAGTAAAC | 411 |
| GCCAAGTGCT | | GCGAAATGTT | |
| GCTGTTAATGCCAAG | 412 | GCAGTAAACGCGAAA | 413 |
| TGCT | | TGTT | |
| GCCCAGAAGCAAGTC | 414 | GCGCAAAAACAGGTG | 415 |
| AAGA | | AAAA | |
| AAGAGCCTCCAGAGC | 416 | AAAAGTCTGCAAAGT | 417 |
| TTGTTG | | TTATTA | |
| GCATCAAGGAGCTCA | 418 | GGATTAAAGAACTGA | 419 |
| CCTA | | CGTA | |
| GCTAAAGGTCAAGGC | 420 | ACTTAAAGTGAAAGC | 421 |
| CTACAA | | GTATAA | |

[0104] In some cases, the mammal can have ACM, and the gene to be suppressed and replaced can be DSP (which encodes desmoplakin). An exemplary DSP sequence is set forth in NCBI RefSeq accession number NM_004415 (e.g., version NM_004415.4). A DSP polypeptide can, in some cases, have the amino acid sequence set forth in NCBI RefSeq accession number NP_004406 (e.g., version NP_004406.2).

[0105] Examples of shRNA sequences and corresponding shIMM sequences targeted to DSP are set forth in TABLE 1E.

TABLE 1E
Representative DSP shRNA
and shIMM sequences

| | SEQ | | SEQ |
|---|---|---|---|
| shRNA Sequence | ID | shIMM Sequence | ID |
| GGAGATGGAATACAA | 422 | GGTGACGGTATTCAG | 423 |
| CTGACT | | CTCACA | |
| GGAAATCCTCGACAG | 424 | GGAGATTCTGGATAG | 425 |
| CTTGATCAGA | | TTTAATTAGG | |
| GAAATCCTCGACAGC | 426 | GAGATTCTGGATAGT | 427 |
| TTGATCAGAGAGAT | | TTAATTAGGGAAAT | |
| GCAAATGCGAGCCCT | 428 | ACAGATGCGTGCGCT | 429 |
| TTATAA | | ATACAA | |
| GGATGAGTTCACCAA | 430 | GGACGAATTTACGAA | 431 |
| ACATGT | | GCACGT | |
| GGATGAGTTCACCAA | 432 | GGACGAATTTACGAA | 433 |
| ACAT | | GCAC | |
| GTCCTCAATCAGCAT | 434 | GTGCTGAACCAACAC | 435 |
| CCAGCTTCAGACAA | | CCTGCATCTGATAA | |
| GCATCCAGCTTCAGA | 436 | ACACCCTGCATCTGA | 437 |
| CAAA | | TAAG | |
| GCAGACGCAGTGGAG | 438 | CCAAACCCAATGGAG | 439 |
| TTGGATTCTTCAGA | | CTGGATACTACAAA | |
| GCAGTGGAGTTGGAT | 440 | CCAATGGAGCTGGAT | 441 |
| TCTT | | ACTA | |
| GGAACAGATCAAGGA | 442 | CGAGCAAATTAAAGA | 443 |
| GCTGGAGAAA | | ACTCGAAAAG | |
| GGTGCAGAACTTGGT | 444 | AGTCCAAAATTTAGT | 445 |
| AAACAA | | TAATAA | |
| GTGCAGAACTTGGTA | 446 | GTCCAAAATTTAGTT | 447 |
| AACA | | AATA | |
| GAGCTCTCTGTGACT | 448 | GGGCACTGTGCGATT | 449 |
| ACAA | | ATAA | |
| GGCTCTGTGGAACCA | 450 | AGCACTCTGGAATCA | 451 |
| GCTCTACATCAACA | | ACTGTATATTAATA | |
| GCACTACTGCATGAT | 44 | GCATTATTGTATGAT | 452 |
| TGACATAGAGAAGA | | AGATATTGAAAAAA | |
| GCATGATTGACATAG | 453 | GTATGATAGATATTG | 454 |
| AGAAGA | | AAAAAA | |
| GCATGATTGACATAG | 455 | GTATGATAGATATTG | 456 |
| AGAA | | AAAA | |
| GGAACCTGCCAAGAT | 457 | GGTACGTGTCAGGAC | 458 |
| GTCAACCATAATAA | | GTGAATCACAACAA | |
| GACCAGGGATCTTCT | 459 | GATCAAGGTTCATCA | 460 |
| CACCACATCACAGT | | CATCATATTACTGT | |
| GACCAGGGATCTTCT | 461 | GATCAAGGTTCATCA | 462 |
| CACCACATCA | | CATCATATTA | |
| GCTTAAGAGTGTGCA | 463 | ACTAAAAAGCGTCCA | 464 |
| GAATGA | | AAACGA | |
| GCCTGGACCTGGATA | 465 | GTCTCGATCTCGACA | 466 |
| AAGT | | AGGT | |
| GTTGGCCACTATGAA | 467 | ATTAGCGACAATGAA | 468 |
| GACAGA | | AACTGA | |
| GTTGGCCACTATGAA | 469 | ATTAGCGACAATGAA | 470 |
| GACA | | AACT | |
| GGCCACTATGAAGAC | 471 | AGCGACAATGAAAAC | 472 |
| AGAACT | | TGAGCT | |
| GGCCACTATGAAGAC | 473 | AGCGACAATGAAAAC | 474 |
| AGAA | | TGAG | |
| GCCACTATGAAGACA | 475 | GCGACAATGAAAACT | 476 |
| GAACTA | | GAGCTT | |
| GCAGATCCACTCTCA | 477 | ACAAATTCATTCACA | 478 |
| GACT | | AACA | |
| GGCTTTCTGCAAGTG | 479 | AGCATTTTGTAAATG | 480 |
| GCTCTATGAT | | GCTGTACGAC | |
| GCTTTCTGCAAGTGG | 481 | GCATTTTGTAAATGG | 482 |
| CTCTAT | | CTGTAC | |
| GTGGCTCTATGATGC | 483 | ATGGCTGTACGACGC | 484 |
| TAAA | | AAAG | |
| GCTCGGTACATTGAA | 485 | GCACGCTATATAGAG | 486 |
| CTACTT | | CTTCTA | |
| GAACTACTTACAAGA | 487 | GAGCTTCTAACTAGG | 488 |
| TCTGGAGACTATTA | | TCAGGTGATTACTA | |
| GAACTACTTACAAGA | 489 | GAGCTTCTAACTAGG | 490 |
| TCTGGAGACT | | TCAGGTGATT | |
| GGCAGAGTGTTCCCA | 491 | AGCTGAATGCTCGCA | 492 |
| GTTCAA | | ATTTAA | |
| GCAGAGTGTTCCCAG | 493 | GCTGAATGCTCGCAA | 494 |
| TTCAAA | | TTTAAG | |
| GCAGAGTGTTCCCAG | 495 | GCTGAATGCTCGCAA | 496 |
| TTCA | | TTTA | |
| GGCAAAGGTAAGAAA | 497 | CGCTAAAGTTAGGAA | 498 |
| CCACTA | | TCATTA | |
| GCAAAGGTAAGAAAC | 499 | GCTAAAGTTAGGAAT | 500 |
| CACTAT | | CATTAC | |
| GACCACCATCAAGGA | 501 | AACGACGATTAAAGA | 502 |
| GATA | | AATT | |
| GAAGGAAGAGGATAC | 503 | AAAAGAGGAAGACAC | 504 |
| CAGT | | GAGC | |
| GGAGCTTATCTGAAG | 505 | GAAGTTTGTCAGAGG | 506 |
| AAAT | | AGAT | |
| GAGCTTATCTGAAGA | 507 | AAGTTTGTCAGAGGA | 508 |
| AATA | | GATT | |
| GATCGACAAAGAAAC | 509 | CATTGATAAGGAGAC | 510 |
| AAATGA | | TAACGA | |
| GATCGACAAAGAAAC | 511 | CATTGATAAGGAGAC | 512 |
| AAAT | | TAAC | |
| GCAGAAAGCAAACAG | 513 | CCAAAAGGCTAATAG | 514 |
| TAGT | | CAGC | |
| GGAGAGGACTGTGAA | 515 | AGAAAGAACAGTCAA | 516 |
| GGACCAGGATATCA | | AGATCAAGACATTA | |
| GACTGTGAAGGACCA | 517 | AACAGTCAAAGATCA | 518 |
| GGATAT | | AGACAT | |
| GTGAAGGACCAGGAT | 519 | GTCAAAGATCAAGAC | 520 |
| ATCA | | ATTA | |
| GAAGCAGAAGGTGGA | 521 | AAAACAAAAAGTCGA | 522 |
| AGAGGA | | GGAAGA | |
| GGAGCAGGCATCCAT | 523 | CGAACAAGCTTCGAT | 524 |
| TGTT | | AGTA | |
| GGAACAGGAAAGTGT | 525 | AGAGCAAGAGAGCGT | 526 |
| CAAA | | GAAG | |
| GAAATTGAGAGGCTG | 527 | GAGATAGAAAGACTC | 528 |
| CAGTCT | | CAATCA | |
| GAACCTGACCAAGGA | 529 | AAATCTCACGAAAGA | 530 |
| GCACTT | | ACATTT | |
| GGAGCACTTGATGTT | 531 | AGAACATTTAATGTT | 532 |
| AGAA | | GGAG | |
| GAGCACTTGATGTTA | 533 | GAACATTTAATGTTG | 534 |
| GAAGAA | | GAGGAG | |
| GCACTTGATGTTAGA | 535 | ACATTTAATGTTGGA | 536 |
| AGAA | | GGAG | |
| GCAACCATCTTGGAA | 537 | GCTACGATTTTAGAG | 538 |
| CTAA | | CTTA | |
| GAGGAGGCTATTAGG | 539 | GAAGAAGCAATAAGA | 540 |
| AAGATA | | AAAATT | |
| GGAGGCTATTAGGAA | 541 | AGAAGCAATAAGAAA | 542 |
| GATA | | AATT | |
| GGAGTGAGATCGAAA | 543 | GAAGCGAAATTGAGA | 544 |
| GACT | | GGCT | |
| GAGGATTCTACCAGG | 545 | GAAGACTCAACGAGA | 546 |
| GAGACA | | GAAACT | |
| GGATTCTACCAGGGA | 547 | AGACTCAACGAGAGA | 548 |
| GACA | | AACT | |
| GGAGATTGATAAACT | 549 | AGAAATAGACAAGCT | 550 |
| CAGACA | | GAGGCA | |
| GGAGATTGATAAACT | 551 | AGAAATAGACAAGCT | 552 |
| CAGA | | GAGG | |
| GCTGAGGAAGAAGGT | 553 | CCTCAGAAAAAAAGT | 554 |
| GACA | | CACT | |
| GAGGCCAAGAGAAAG | 555 | GAAGCGAAAAGGAAA | 556 |
| AAATTAATCA | | AAGTTGATTA | |
| GAGGCCAAGAGAAAG | 557 | GAAGCGAAAAGGAAA | 558 |
| AAATTA | | AAGTTG | |
| GAGGCCAAGAGAAAG | 559 | GAAGCGAAAAGGAAA | 560 |
| AAAT | | AAGT | |
| GGCCAAGAGAAAGAA | 561 | AGCGAAAAGGAAAAA | 562 |
| ATTAAT | | GTTGAT | |
| GGCCAAGAGAAAGAA | 563 | AGCGAAAAGGAAAAA | 564 |
| ATTA | | GTTG | |
| GCCAAGAGAAAGAAA | 565 | GCGAAAAGGAAAAAG | 566 |
| TTAA | | TTGA | |
| GAAATTAATCAGCCC | 567 | AAAGTTGATTAGTCC | 568 |
| AGAATCCACAGTCA | | TGAGTCGACTGTGA | |
| GCCCAGAATCCACAG | 569 | GTCCTGAGTCGACTG | 570 |
| TCAT | | TGAT | |
| GGTATAATTGATCCC | 571 | GGAATTATAGACCCG | 572 |
| CATCGGAATGAGAA | | CACCGCAACGAAAA | |
| GATCCCCATCGGAAT | 573 | GACCCGCACCGCAAC | 574 |
| GAGA | | GAAA | |
| AAGAAGGTCAGTTAC | 575 | AAAAAAGTGAGCTAT | 576 |
| GTGCAG | | GTCCAA | |
| GGTCTGCTCTTGCTT | 577 | GGACTCCTGTTACTA | 578 |
| TCAGTA | | TCTGTT | |
| GTCTGCTCTTGCTTT | 579 | GACTCCTGTTACTAT | 580 |
| CAGT | | CTGT | |
| GCTTTCAGTACAGAA | 581 | ACTATCTGTTCAAAA | 582 |
| GAGA | | AAGG | |
| GCATAGCAGGCATAT | 583 | GTATTGCTGGGATTT | 584 |
| ACAA | | ATAA | |
| GGCATTTATGAGGCC | 585 | GGGATATACGAAGCG | 586 |
| ATGAAA | | ATGAAG | |
| GCAACTTGAGGTTAC | 587 | GTAATTTAAGATTGC | 588 |
| CAGT | | CTGT | |
| GCAGAACGAGCTGTC | 589 | GCTGAGCGTGCAGTG | 590 |
| ACTGGGTATAATGA | | ACAGGCTACAACGA | |
| GAGCTGTCACTGGGT | 591 | GTGCAGTGACAGGCT | 592 |
| ATAA | | ACAA | |
| GCTGTCACTGGGTAT | 593 | GCAGTGACAGGCTAC | 594 |
| AATGAT | | AACGAC | |
| GGGTATAATGATCCT | 595 | GGCTACAACGACCCA | 596 |
| GAAACA | | GAGACT | |
| GAAACAGGAAACATC | 597 | GAGACTGGTAATATT | 598 |
| ATCTCT | | ATTTCA | |
| GAAACAGGAAACATC | 599 | GAGACTGGTAATATT | 600 |
| ATCT | | ATTT | |
| GGGCCACGGTATTCG | 601 | AGGGCATGGAATACG | 602 |
| CTTATTAGAA | | GTTGTTGGAG | |
| GGGCCACGGTATTCG | 603 | AGGGCATGGAATACG | 604 |
| CTTATT | | GTTGTT | |
| GGCCACGGTATTCGC | 605 | GGGCATGGAATACGG | 606 |
| TTATTA | | TTGTTG | |
| GCCACGGTATTCGCT | 607 | GGCATGGAATACGGT | 608 |
| TATT | | TGTT | |
| GACCCAAAGGAGAGC | 609 | GATCCTAAAGAAAGT | 610 |
| CATCGTTTACCAGT | | CACCGATTGCCTGT | |
| GGAGAGCCATCGTTT | 611 | AGAAAGTCACCGATT | 612 |
| ACCAGT | | GCCTGT | |
| GGAGAGCCATCGTTT | 613 | AGAAAGTCACCGATT | 614 |
| ACCA | | GCCT | |
| GAGCCATCGTTTACC | 615 | AAGTCACCGATTGCC | 616 |
| AGTTGACATA | | TGTAGATATT | |
| GAGCCATCGTTTACC | 617 | AAGTCACCGATTGCC | 618 |
| AGTTGA | | TGTAGA | |
| GAGCCATCGTTTACC | 619 | AAGTCACCGATTGCC | 620 |
| AGTT | | TGTA | |
| GCCATCGTTTACCAG | 621 | GTCACCGATTGCCTG | 622 |
| TTGACA | | TAGATA | |
| GCCATCGTTTACCAG | 623 | GTCACCGATTGCCTG | 624 |
| TTGA | | TAGA | |
| GTTTACCAGTTGACA | 625 | GATTGCCTGTAGATA | 626 |
| TAGCATATAA | | TTGCTTACAA | |
| GTTGACATAGCATAT | 627 | GTAGATATTGCTTAC | 628 |
| AAGA | | AAAA | |
| GATTCTCTCAGATCC | 629 | AATACTGTCTGACCC | 630 |
| AAGTGATGAT | | TAGCGACGAC | |
| GATTCTCTCAGATCC | 631 | AATACTGTCTGACCC | 632 |
| AAGTGA | | TAGCGA | |
| GATCCAAGTGATGAT | 633 | GACCCTAGCGACGAC | 634 |
| ACCA | | ACGA | |
| GCTCTGTCTTCTGCC | 635 | CCTGTGCCTACTCCC | 636 |
| TCTGAA | | ACTCAA | |
| GGAAGCGTAGAGTGG | 637 | GAAAACGAAGGGTCG | 638 |
| TCATAGTTGA | | TGATTGTAGA | |
| GGAAGCGTAGAGTGG | 639 | GAAAACGAAGGGTCG | 640 |
| TCAT | | TGAT | |
| GAAGCGTAGAGTGGT | 641 | AAAACGAAGGGTCGT | 642 |
| CATAGT | | GATTGT | |
| GAAGCGTAGAGTGGT | 643 | AAAACGAAGGGTCGT | 644 |
| CATA | | GATT | |
| GCGTAGAGTGGTCAT | 645 | ACGAAGGGTCGTGAT | 646 |
| AGTTGA | | TGTAGA | |
| GCGTAGAGTGGTCAT | 647 | ACGAAGGGTCGTGAT | 648 |
| AGTT | | TGTA | |
| GTTGACCCAGAAACC | 649 | GTAGATCCTGAGACG | 650 |
| AATAAA | | AACAAG | |
| GACCCAGAAACCAAT | 651 | GATCCTGAGACGAAC | 652 |
| AAAGAAATGT | | AAGGAGATGT | |
| GACCCAGAAACCAAT | 653 | GATCCTGAGACGAAC | 654 |
| AAAGAA | | AAGGAG | |
| GTCTGTTCAGGAGGC | 655 | GTCAGTACAAGAAGC | 656 |
| CTACAA | | GTATAA | |
| GCCTACAAGAAGGGC | 657 | GCGTATAAAAAAGGG | 658 |
| CTAATT | | CTTATA | |
| GCAGGAATGTGAATG | 659 | ACAAGAGTGCGAGTG | 660 |
| GGAAGAAATA | | GGAGGAGATT | |
| GGAATGTGAATGGGA | 661 | AGAGTGCGAGTGGGA | 662 |
| AGAAAT | | GGAGAT | |
| GAATGTGAATGGGAA | 663 | GAGTGCGAGTGGGAG | 664 |
| GAAATA | | GAGATT | |
| GGGAAGAAATAACCA | 665 | GGGAGGAGATTACGA | 666 |
| TCACGGGATCAGAT | | TTACCGGTTCTGAC | |
| GCAGTCAGTATGATA | 667 | GGAGCCAATACGACA | 668 |
| TTCAAGATGCTATT | | TACAGGACGCAATA | |
| GCAGTCAGTATGATA | 669 | GGAGCCAATACGACA | 670 |
| TTCA | | TACA | |
| GCCTCAGCCTCACTC | 671 | GTCTGAGTCTGACAC | 672 |
| AATT | | AGTT | |
| GCTGACATGATCTCC | 673 | GCAGATATGATTTCG | 674 |
| TTGAAA | | TTAAAG | |
| GCTCCCGACATGAAT | 675 | GTTCGCGTCACGAGT | 676 |
| CAGTAA | | CTGTTA | |
| GCTCCCGACATGAAT | 677 | GTTCGCGTCACGAGT | 678 |
| CAGT | | CTGT | |
| GCGTCAGGAATTTAA | 679 | GTGTGAGAAACTTGA | 680 |
| CCATAA | | CGATTA | |
| GTCAGGAATTTAACC | 681 | GTGAGAAACTTGACG | 682 |
| ATAA | | ATTA | |
| GTGTGATTGACCAAG | 683 | GAGTCATAGATCAGG | 684 |
| ACAT | | ATAT | |
| GCAGCAGAGGCAGTG | 685 | GCTGCTGAAGCTGTC | 686 |
| AAAGAA | | AAGGAG | |
| GGAAGTGCATGGGAG | 687 | CGAGGTCCACGGCAG | 688 |
| GATA | | AATT | |
| GAAGTGCATGGGAGG | 689 | GAGGTCCACGGCAGA | 690 |
| ATAA | | ATTA | |
| GCTCCATGGTAGAAG | 691 | GGTCGATGGTTGAGG | 692 |
| ATATCA | | ACATTA | |
| GACGCCACAGGGAAT | 693 | GATGCGACTGGCAAC | 694 |
| TCTT | | TCAT | |
| GAATTCTTCCTACTC | 695 | CAACTCATCGTATTC | 696 |
| TTAT | | ATAC | |

[0106] In some cases, the mammal can have HCM, and the gene to be suppressed and replaced can be MYBPC3 (which encodes myosin binding protein C3). An exemplary MYBPC3 sequence is set forth in NCBI RefSeq accession number NM_000256 (e.g., version NM_000256.3). A MYBPC3 polypeptide can, in some cases, have the amino acid sequence set forth in NCBI RefSeq accession number NP_000247 (e.g., version NP_000247.2).

[0107] Examples of shRNA sequences and corresponding shIMM sequences targeted to MYBPC3 are set forth in TABLE 1F.

TABLE 1F
Representative MYBPC3
shRNA and shIMM sequences

| | SEQ | | SEQ |
|---|---|---|---|
| shRNA Sequence | ID | shIMM Sequence | ID |
| GCTCCTCCAAGGTCA | 697 | GGTCGTCGAAAGTGA | 698 |
| AGTT | | AATT | |
| GCTCCAACTTCAATC | 699 | GTTCGAATTTTAACC | 700 |
| TCACTGTCCA | | TGACAGTGCA | |
| GCCATGAGGACACTG | 701 | GTCACGAAGATACAG | 702 |
| GGATTCTGGACTT | | GCATACTCGATTT | |
| GAGGACACTGGGATT | 703 | GAAGATACAGGCATA | 704 |
| CTGGACTTCA | | CTCGATTTTA | |
| GGACACTGGGATTCT | 705 | AGATACAGGCATACT | 706 |
| GGACTT | | CGATTT | |
| GAGAAGAAGAGCACA | 707 | GAAAAAAAAAGTACT | 708 |
| GCCTTTCAGA | | GCGTTCCAAA | |
| GAGAAGAAGAGCACA | 709 | GAAAAAAAAAGTACT | 710 |
| GCCTTTCAGAAGA | | GCGTTCCAAAAAA | |
| GGTGAGCAAAGGCCA | 711 | AGTCAGTAAGGGGCA | 712 |
| CAAGAT | | TAAAAT | |
| GAGGTCAAATGGCTC | 713 | GAAGTGAAGTGGCTG | 714 |
| AAGAAT | | AAAAAC | |
| GAGGTCAAATGGCTC | 715 | GAAGTGAAGTGGCTG | 716 |
| AAGA | | AAAA | |
| GGTCAAATGGCTCAA | 717 | AGTGAAGTGGCTGAA | 718 |
| GAAT | | AAAC | |
| GCTCAAGAATGGCCA | 719 | GCTGAAAAACGGGCA | 720 |
| GGAGATCCAGATGA | | AGAAATTCAAATGA | |
| GCTCAAGAATGGCCA | 721 | GCTGAAAAACGGGCA | 722 |
| GGAGAT | | AGAAAT | |
| GGAGGAGACCTTCAA | 46 | CGAAGAAACGTTTAA | 723 |
| ATACCGGTTCAAGA | | GTATCGCTTTAAAA | |
| AAGGACCGCAGCATC | 724 | AAAGATCGGAGTATT | 725 |
| TTCACG | | TTTACC | |
| GGGCAGAGAAGGAAG | 726 | GCGCTGAAAAAGAGG | 727 |
| ATGA | | ACGA | |
| GAGAAGGAAGATGAG | 728 | GAAAAAGAGGACGAA | 729 |
| GGCGTCTACA | | GGGGTGTATA | |
| GAAGATGAGGGCGTC | 730 | GAGGACGAAGGGGTG | 731 |
| TACA | | TATA | |
| GCTACATCCTGGAGC | 732 | GGTATATTCTCGAAC | 733 |
| GCAAGAAGAA | | GGAAAAAAAA | |
| GCGCAAGAAGAAGAA | 734 | ACGGAAAAAAAAAAA | 735 |
| GAGCTA | | AAGTTA | |
| GCAAGAAGAAGAAGA | 736 | GGAAAAAAAAAAAAA | 737 |
| GCTA | | GTTA | |
| GCGCCAGACCATTCA | 738 | CCGGCAAACGATACA | 739 |
| GAAGAA | | AAAAAA | |
| GCCAGACCATTCAGA | 740 | GGCAAACGATACAAA | 741 |
| AGAA | | AAAA | |
| GGCATCACCTATGAG | 742 | GGGATTACGTACGAA | 743 |
| CCACCCAACTATAA | | CCTCCGAATTACAA | |
| GTAGCCCCAAGCCCA | 744 | GAAGTCCGAAACCGA | 745 |
| AGATTT | | AAATAT | |
| GCCCAAGATTTCCTG | 746 | ACCGAAAATATCGTG | 747 |
| GTTCAAGAAT | | GTTTAAAAAC | |
| GCCCAAGATTTCCTG | 748 | ACCGAAAATATCGTG | 749 |
| GTTCAA | | GTTTAA | |
| GATTTCCTGGTTCAA | 750 | AATATCGTGGTTTAA | 751 |
| GAAT | | AAAC | |
| GTTGACTCTGGAGAT | 752 | CTTAACACTCGAAAT | 753 |
| TAGA | | AAGG | |

[0108] In some cases, the mammal can have DCM, and the gene to be suppressed and replaced can be RBM20 (which encodes RNA binding motif protein 20). An exemplary RBM20 sequence is set forth in NCBI RefSeq accession number NM_001134363 (e.g., version NM_001134363.3). A RBM20 polypeptide can, in some cases, have the amino acid sequence set forth in NCBI RefSeq accession number NP_001127835 (e.g., version NP_001127835.2).

[0109] Examples of shRNA sequences and corresponding shIMM sequences targeted to RBM20 are set forth in TABLE 1G.

TABLE 1G
Representative RBM20 shRNA
and shIMM sequences

| | SEQ | | SEQ |
|---|---|---|---|
| shRNA Sequence | ID | shIMM Sequence | ID |
| GCCATGTCCCAGCCT | 754 | GCGATGTCGCAACCA | 755 |
| CTCTTCAATCAACT | | CTGTTTAACCAGCT | |
| GTCCCAGCCTCTCTT | 756 | GTCGCAACCACTGTT | 757 |
| CAATCA | | TAACCA | |
| GCCCTGAAACAGATG | 758 | GGCCAGAGACTGACG | 759 |
| GTCA | | GACA | |
| GCCAAAGCAAGCCTG | 760 | GGCAGAGTAAACCAG | 761 |
| ATCTCA | | ACCTGA | |
| GCCAAAGCAAGCCTG | 762 | GGCAGAGTAAACCAG | 763 |
| ATCT | | ACCT | |
| GCCGCATATCTGTAG | 764 | ACCCCACATTTGCAG | 765 |
| CATCTGTGACAAGA | | TATTTGCGATAAAA | |
| GCATATCTGTAGCAT | 766 | CCACATTTGCAGTAT | 767 |
| CTGTGA | | TTGCGA | |
| GCATATCTGTAGCAT | 768 | CCACATTTGCAGTAT | 769 |
| CTGT | | TTGC | |
| GTAGCATCTGTGACA | 770 | GCAGTATTTGCGATA | 771 |
| AGAA | | AAAA | |
| GCATCTGTGACAAGA | 772 | GTATTTGCGATAAAA | 773 |
| AGGTGT | | AAGTCT | |
| GAAAGGGAAGCTGCA | 774 | CAAGGGCAAACTCCA | 775 |
| CGCTCAGAAA | | TGCACAAAAG | |
| GGAAGCTGCACGCTC | 776 | GCAAACTCCATGCAC | 777 |
| AGAAAT | | AAAAGT | |
| GAAGCTGCACGCTCA | 778 | CAAACTCCATGCACA | 779 |
| GAAA | | AAAG | |
| GCTCAGAAATGCCTG | 780 | GCACAAAAGTGTCTC | 781 |
| GTCT | | GTGT | |
| GCTGGCATCCGGTGT | 782 | GCAGGGATTCGCTGC | 783 |
| ATACTT | | ATTCTA | |
| GCTGTTTATAACCCT | 784 | GCAGTATACAATCCA | 785 |
| GCTGGGAATGAAGA | | GCAGGCAACGAGGA | |
| GCCCATTCCAGCAAG | 786 | CCCGATACCTGCTAG | 787 |
| GTCATTCACTCAGT | | ATCTTTTACACAAT | |
| GCCCATTCCAGCAAG | 788 | CCCGATACCTGCTAG | 789 |
| GTCATT | | ATCTTT | |
| GCAAGGTCATTCACT | 790 | GCTAGATCTTTTACA | 791 |
| CAGTCA | | CAATCT | |
| GCAAGGTCATTCACT | 792 | GCTAGATCTITTACA | 793 |
| CAGT | | CAAT | |
| GGTCATTCACTCAGT | 48 | GATCTTTTACACAAT | 794 |
| CAAGCCCCACATTT | | CTAGTCCGACTTTC | |
| GAAGGAAGCTGCACT | 795 | GAGGGTAGTTGTACA | 796 |
| GAGAAT | | GAAAAC | |
| GAAGGAAGCTGCACT | 797 | GAGGGTAGTTGTACA | 798 |
| GAGA | | GAAA | |
| GAAGCTGCACAGGCC | 799 | GAGGCAGCTCAAGCG | 800 |
| ATGGTCCAGTATTA | | ATGGTGCAATACTA | |
| GCTGCACAGGCCATG | 801 | GCAGCTCAAGCGATG | 802 |
| GTCCAGTATTATCA | | GTGCAATACTACCA | |
| GCACAGGCCATGGTC | 803 | GCTCAAGCGATGGTG | 804 |
| CAGTATTATCAAGA | | CAATACTACCAGGA | |
| GGCCATGGTCCAGTA | 805 | AGCGATGGTGCAATA | 806 |
| TTATCAAGAA | | CTACCAGGAG | |
| GGCCATGGTCCAGTA | 807 | AGCGATGGTGCAATA | 808 |
| TTATCA | | CTACCA | |
| GGCCATGGTCCAGTA | 809 | AGCGATGGTGCAATA | 810 |
| TTAT | | CTAC | |
| GCCATGGTCCAGTAT | 811 | GCGATGGTGCAATAC | 812 |
| TATCAAGAAA | | TACCAGGAGA | |
| GGTCCAGTATTATCA | 813 | GGTGCAATACTACCA | 814 |
| AGAA | | GGAG | |
| GTCCAGTATTATCAA | 815 | GTGCAATACTACCAG | 816 |
| GAAA | | GAGA | |
| GCTGTGATCAATGGT | 817 | GCAGTCATTAACGGA | 818 |
| GAGA | | GAAA | |
| GAAGTTGCTCATTCG | 819 | AAAATTACTGATACG | 820 |
| GATGTCCAAGAGAT | | CATGTCGAAAAGGT | |
| GTTGCTCATTCGGAT | 821 | ATTACTGATACGCAT | 822 |
| GTCCAAGAGATACA | | GTCGAAAAGGTATA | |
| GTTGCTCATTCGGAT | 823 | ATTACTGATACGCAT | 824 |
| GTCCAAGAGA | | GTCGAAAAGG | |
| GGATGTCCAAGAGAT | 825 | GCATGTCGAAAAGGT | 826 |
| ACAA | | ATAA | |
| GGAATTGCAGCTCAA | 827 | AGAGTTACAACTGAA | 828 |
| GAAA | | AAAG | |
| GTGGGCAGACAGGAG | 829 | GTCGGGAGGCAAGAA | 830 |
| AAAGAAGCAGAGTT | | AAGGAGGCTGAATT | |
| GTGGGCAGACAGGAG | 831 | GTCGGGAGGCAAGAA | 832 |
| AAAGAA | | AAGGAG | |
| GGGCAGACAGGAGAA | 833 | CGGGAGGCAAGAAAA | 834 |
| AGAA | | GGAG | |
| GCAGACAGGAGAAAG | 835 | GGAGGCAAGAAAAGG | 836 |
| AAGCAGAGTT | | AGGCTGAATT | |
| AAGAAGCAGAGTTCT | 837 | AGGAGGCTGAATTTT | 838 |
| CTGATC | | CAGACC | |
| GAGCTGGAAGAAATT | 839 | GAACTCGAGGAGATA | 840 |
| GTGCCCATTGACCA | | GTCCCGATAGATCA | |
| GCCCATTGACCAGAA | 841 | CCCGATAGATCAAAA | 842 |
| AGACAA | | GGATAA | |
| GTGTGACAACCACCT | 843 | GCGTCACTACGACGT | 844 |
| TAGACT | | TGGATT | |
| GTGTGACAACCACCT | 845 | GCGTCACTACGACGT | 846 |
| TAGA | | TGGA | |
| GTGACAACCACCTTA | 847 | GTCACTACGACGTTG | 848 |
| GACTTA | | GATTTG | |
| GTGACAACCACCTTA | 849 | GTCACTACGACGTTG | 850 |
| GACT | | GATT | |
| GACAACCACCTTAGA | 851 | CACTACGACGTTGGA | 852 |
| CTTA | | TTTG | |
| GCAGAAATCAGCCTC | 853 | GCTGAGATTAGTCTG | 854 |
| AAGTCA | | AAATCT | |
| GCAGAAATCAGCCTC | 855 | GCTGAGATTAGTCTG | 856 |
| AAGT | | AAAT | |
| GAAATCAGCCTCAAG | 857 | GAGATTAGTCTGAAA | 858 |
| TCACCCAGAGAACT | | TCTCCGAGGGAGCT | |
| GCAAAGGGAGTGGAG | 859 | GCTAAAGGTGTCGAA | 860 |
| AGCTCAGATGTTCA | | AGTTCTGACGTACA | |
| GGAGTGGAGAGCTCA | 861 | GGTGTCGAAAGTTCT | 862 |
| GATGTT | | GACGTA | |
| GAGTGGAGAGCTCAG | 863 | GTGTCGAAAGTTCTG | 864 |
| ATGT | | ACGT | |
| GTGGATGATTGCAAG | 865 | GTCGACGACTGTAAA | 866 |
| ACCA | | ACGA | |
| GAGGTCACCAGAGTA | 867 | CAGATCTCCTGAATA | 868 |
| CACT | | TACA | |

[0110] In some cases, the mammal can have LQTS or Timothy syndrome, and the gene to be suppressed and replaced can be CACNA1C (which encodes calcium voltage-gated channel subunit alpha1 C). An exemplary CACNA1C sequence is set forth in NCBI RefSeq accession number NM_000719 (e.g., version NM_000719.7). A CACNA1C polypeptide can, in some cases, have the amino acid sequence set forth in NCBI RefSeq accession number NP_000710 (e.g., version NP_000710.5).

[0111] Examples of shRNA sequences and corresponding shIMM sequences targeted to CACNA1C are set forth in TABLE 111.

TABLE 1H
Representative CACNA1C shRNA
and shIMM sequences

| | SEQ | | SEQ |
|---|---|---|---|
| shRNA Sequence | ID | shIMM Sequence | ID |
| GTCAATGAGAATACG | 869 | GTGAACGAAAACACC | 870 |
| AGGATGTACA | | AGAATGTATA | |
| GGAACGAGTGGAATA | 50 | CGAGCGTGTCGAGTA | 871 |
| TCTCTTTCTCATAA | | CCTGTTCCTGATTA | |
| GGAGAAGCAGCAGCT | 872 | CGAAAAACAACAACT | 873 |
| AGAAGA | | TGAGGA | |
| GGAGAAGCAGCAGCT | 874 | CGAAAAACAACAACT | 875 |
| AGAA | | TGAG | |
| GCAGCAGCTAGAAGA | 876 | ACAACAACTTGAGGA | 877 |
| GGATCTCAAA | | AGACCTGAAG | |
| GCAGCAGCTAGAAGA | 878 | ACAACAACTTGAGGA | 879 |
| GGATCT | | AGACCT | |
| GCAGCTAGAAGAGGA | 880 | ACAACTTGAGGAAGA | 881 |
| TCTCAA | | CCTGAA | |
| GCTAGAAGAGGATCT | 882 | ACTTGAGGAAGACCT | 883 |
| CAAA | | GAAG | |
| GATTGGATCACTCAG | 884 | GACTGGATTACACAA | 885 |
| GCCGAAGACA | | GCGGAGGATA | |
| GCTCCTTCTCCTCTT | 886 | CCTGCTACTGCTGTT | 887 |
| CCTCTTCATCATCA | | TCTGTTTATTATTA | |
| AAGTTCAACTTTGAT | 888 | AAATTTAATTTCGAC | 889 |
| GAGATG | | GAAATG | |
| GGACTGGAATTCGGT | 890 | AGATTGGAACTCCGT | 891 |
| GATGTA | | CATGTA | |
| GACTGGAATTCGGTG | 892 | GATTGGAACTCCGTC | 893 |
| ATGTAT | | ATGTAC | |
| GACTGGAATTCGGTG | 894 | GATTGGAACTCCGTC | 895 |
| ATGT | | ATGT | |
| GGAATTCGGTGATGT | 896 | GGAACTCCGTCATGT | 897 |
| ATGA | | ACGA | |
| GGAGGAGGAAGAGGA | 898 | AGAAGAAGAGGAAGA | 899 |
| GAAGGAGAGAAAGA | | AAAAGAAAGGAAAA | |
| GCCGGAACTACTTCA | 900 | GTCGCAATTATTTTA | 901 |
| ACAT | | ATAT | |
| GTCCAGTGCAATCAA | 902 | ATCGAGCGCTATTAA | 903 |
| TGTCGTGAAGATCT | | CGTGGTCAAAATTT | |
| GCTCTTCAAGGGAAA | 904 | ACTGTTTAAAGGTAA | 905 |
| GCTGTACACCTGTT | | ACTCTATACGTGCT | |
| GGGAGCAGGAGTACA | 906 | GCGAACAAGAATATA | 907 |
| AGAACTGTGA | | AAAATTGCGA | |
| GGGAGCAGGAGTACA | 908 | GCGAACAAGAATATA | 909 |
| AGAACT | | AAAATT | |
| GAGCAGGAGTACAAG | 910 | GAACAAGAATATAAA | 911 |
| AACTGT | | AATTGC | |
| GCAGGAGTACAAGAA | 912 | ACAAGAATATAAAAA | 913 |
| CTGTGA | | TTGCGA | |
| GGAACAACAACTTTC | 914 | GCAATAATAATTTCC | 915 |
| AGACCT | | AAACGT | |
| GAAGCCAAGGGTCGT | 916 | GAGGCGAAAGGACGA | 917 |
| ATCAAA | | ATTAAG | |
| GAAGCCAAGGGTCGT | 918 | GAGGCGAAAGGACGA | 919 |
| ATCA | | ATTA | |

[0112] In some cases, the mammal can have ACM, and the gene to be suppressed and replaced can be PKP2 (which encodes plakophilin 2). An example of a PKP2 construct is shown in FIGS. 4A and 4B. An exemplary PKP2 sequence is set forth in NCBI RefSeq accession number NM_001005242 (e.g., version NM_001005242.3; FIG. 4C). A PKP2 polypeptide can, in some cases, have the amino acid sequence set forth in NCBI RefSeq accession number NP_001005242 (e.g., version NP_001005242.2; FIG. 4C).

[0113] Examples of shRNA sequences and corresponding shIMM sequences targeted to PKP2 are set forth in TABLE 1I.

TABLE 1I
Representative PKP2 shRNA
and shIMM sequences

| | SEQ | | SEQ |
|---|---|---|---|
| shRNA Sequence | ID | shIMM Sequence | ID |
| GCAGTGTTCCTGAGT | 920 | GTAGCGTACCAGAAT | 921 |
| ATGTCTACAA | | ACGTGTATAA | |
| GCAGTGTTCCTGAGT | 922 | GTAGCGTACCAGAAT | 923 |
| ATGT | | ACGT | |
| GTGTTCCTGAGTATG | 924 | GCGTACCAGAATACG | 925 |
| TCTACA | | TGTATA | |
| GTTCCTGAGTATGTC | 926 | GTACCAGAATACGTG | 927 |
| TACAACCTACACTT | | TATAATCTTCATTT | |
| GTTCCTGAGTATGTC | 928 | GTACCAGAATACGTG | 929 |
| TACA | | TATA | |
| GCTAAAGGCTGGCAC | 930 | GCTTAAAGCAGGGAC | 931 |
| AACT | | TACA | |
| GCACAACTGCCACTT | 932 | GGACTACAGCGACAT | 933 |
| ATGA | | ACGA | |
| GGGAAGAGGAACAGC | 934 | GGGTAGGGGTACTGC | 935 |
| ACAGTA | | TCAATA | |
| GAAGAGGAACAGCAC | 936 | GTAGGGGTACTGCTC | 937 |
| AGTACA | | AATATA | |
| GAAGAGGAACAGCAC | 938 | GTAGGGGTACTGCTC | 939 |
| AGTA | | AATA | |
| CTCTGAGGAGACTGG | 940 | CACTCAGAAGGCTCG | 941 |
| AGATTT | | AAATAT | |
| GAGGAGACTGGAGAT | 942 | CAGAAGGCTCGAAAT | 943 |
| TTCT | | ATCA | |
| GCTCACTACACGCAC | 944 | GCACATTATACCCAT | 945 |
| AGCGATTACCAGTA | | AGTGACTATCAATA | |
| GTACCAGCATGGCTC | 946 | ATATCAACACGGGTC | 947 |
| TGTT | | AGTA | |
| GGCAACCTCTTGGAG | 948 | GGGAATCTGTTAGAA | 949 |
| AAGGAGAACTACCT | | AAAGAAAATTATCT | |
| GGAATGCAGACATGG | 950 | GCAACGCTGATATGG | 951 |
| AGATGACTCT | | AAATGACACT | |
| GGAATGCAGACATGG | 952 | GCAACGCTGATATGG | 953 |
| AGATGA | | AAATGA | |
| GGGCCTTGAGAAACT | 954 | GCGCGTTAAGGAATT | 955 |
| TAGT | | TGGT | |
| GGCCTTGAGAAACTT | 956 | CGCGTTAAGGAATTT | 957 |
| AGTA | | GGTT | |
| GACAACAAATTGGAG | 958 | GATAATAAGTTAGAA | 959 |
| GTGGCTGAACTAAA | | GTCGCAGAGCTTAA | |
| GCTGAAGCAAACCAG | 960 | CCTCAAACAGACGAG | 961 |
| AGACTTGGAGACTA | | GGATTTAGAAACAA | |
| GCTGAAGCAAACCAG | 962 | CCTCAAACAGACGAG | 963 |
| AGACTT | | GGATTT | |
| GAAGCAAACCAGAGA | 964 | CAAACAGACGAGGGA | 965 |
| CTTGGAGACT | | TTTAGAAACA | |
| GCAAACCAGAGACTT | 966 | ACAGACGAGGGATTT | 967 |
| GGAGACTAAA | | AGAAACAAAG | |
| GGATGCCTAAGAAAC | 968 | GGTTGTCTTAGGAAT | 969 |
| ATGAGT | | ATGAGC | |
| GGATGCCTAAGAAAC | 970 | GGTTGTCTTAGGAAT | 971 |
| ATGA | | ATGA | |
| GATGCCTAAGAAACA | 972 | GTTGTCTTAGGAATA | 973 |
| TGAGTT | | TGAGCT | |
| GAGAAGATGTGACGG | 974 | GAGGAGGTGCGATGG | 975 |
| ACTCAT | | TCTGAT | |
| GAAGATGTGACGGAC | 976 | GGAGGTGCGATGGTC | 977 |
| TCAT | | TGAT | |
| GAGGAACCATTGCAG | 978 | GGGGTACGATAGCTG | 979 |
| ATTA | | ACTA | |
| GGAACCATTGCAGAT | 980 | GGTACGATAGCTGAC | 981 |
| TACCAGCCAGATGA | | TATCAACCTGACGA | |
| GAACCATTGCAGATT | 982 | GTACGATAGCTGACT | 983 |
| ACCA | | ATCA | |
| GATGACAAGGCCACG | 984 | GACGATAAAGCGACC | 985 |
| GAGAAT | | GAAAAC | |
| GCATTCTTCATAACC | 986 | GTATACTACACAATC | 987 |
| TCTCCTACCA | | TGTCGTATCA | |
| GCATTCTTCATAACC | 988 | GTATACTACACAATC | 989 |
| TCTCCT | | TGTCGT | |
| GCAGAGCTCCCAGAG | 52 | GCTGAACTGCCTGAA | 990 |
| AAATAT | | AAGTAC | |
| GGCAGTCGAAGCAGG | 991 | GGGAGCCGTAGTAGA | 992 |
| AAAGTA | | AAGGTT | |
| GCAGTCGAAGCAGGA | 993 | GGAGCCGTAGTAGAA | 994 |
| AAGTAA | | AGGTTA | |
| GTCGAAGCAGGAAAG | 995 | GCCGTAGTAGAAAGG | 996 |
| TAAA | | TTAA | |
| GTGGCTGTGGCATTC | 997 | ATGGCTCTGGCACTC | 998 |
| CATTGTTATA | | GATAGTAATT | |
| GGCTGTGGCATTCCA | 999 | GGCTCTGGCACTCGA | 1000 |
| TTGTTA | | TAGTAA | |
| GCTGTGGCATTCCAT | 1001 | GCTCTGGCACTCGAT | 1002 |
| TGTTAT | | AGTAAT | |
| GCTGTGGCATTCCAT | 1003 | GCTCTGGCACTCGAT | 1004 |
| TGTT | | AGTA | |
| GTGGCATTCCATTGT | 1005 | CTGGCACTCGATAGT | 1006 |
| TATA | | AATT | |
| AAGACAGCCATCTCG | 1007 | AAAACTGCGATTTCC | 1008 |
| CTGCTG | | CTCCTC | |
| GCTGAGGAATCTGTC | 1009 | CCTCAGAAACCTCTC | 1010 |
| CCGGAATCTT | | GCGCAACCTA | |
| GAGGAATCTGTCCCG | 1011 | CAGAAACCTCTCGCG | 1012 |
| GAATCTTTCT | | CAACCTATCA | |
| GGAATCTGTCCCGGA | 1013 | GAAACCTCTCGCGCA | 1014 |
| ATCTTT | | ACCTAT | |
| GAATCTGTCCCGGAA | 1015 | AAACCTCTCGCGCAA | 1016 |
| TCTT | | CCTA | |
| GAAGGCTCAGTTTAA | 1017 | AAAAGCACAATTCAA | 1018 |
| GAAGACAGAT | | AAAAACTGAC | |
| AAGGCTCAGTTTAAG | 1019 | AAAGCACAATTCAAA | 1020 |
| AAGACA | | AAAACT | |
| GGCTCAGTTTAAGAA | 1021 | AGCACAATTCAAAAA | 1022 |
| GACAGA | | AACTGA | |
| GGCTCAGTTTAAGAA | 1023 | AGCACAATTCAAAAA | 1024 |
| GACA | | AACT | |
| GCTCAGTTTAAGAAG | 1025 | GCACAATTCAAAAAA | 1026 |
| ACAGAT | | ACTGAC | |
| GGACTGCCAAAGCCT | 1027 | GCACAGCGAAGGCGT | 1028 |
| ACCACTCCCTTAAA | | ATCATTCGCTAAAG | |

[0114] In some cases, the mammal can have ACM, and the gene to be suppressed and replaced can be DSG2 (which encodes desmoglein 2). An exemplary DSG2 sequence is set forth in NCBI RefSeq accession number NM_001943 (e.g., version NM_001943.5). A DSG2 polypeptide can, in some cases, have the amino acid sequence set forth in NCBI RefSeq accession number NP_001934 (e.g., version NP_001934.2).

[0115] Examples of shRNA sequences and corresponding shIMM sequences targeted to DSG2 are set forth in TABLE 1J.

TABLE 1J
Representative DSG2 shRNA
and shIMM sequences

| | SEQ | | SEQ |
|---|---|---|---|
| shRNA Sequence | ID | shIMM Sequence | ID |
| GTGGACTTCACTTAC | 1048 | GCGGTCTACATTTGC | 1049 |
| AGGT | | AAGT | |
| GGGAGGGAGAGGATC | 1050 | GCGAAGGTGAAGACC | 1051 |
| TGTCCAAGAAGAAT | | TCTCGAAAAAAAAC | |
| GAGGGAGAGGATCTG | 1052 | GAAGGTGAAGACCTC | 1053 |
| TCCAAGAAGA | | TCGAAAAAAA | |
| GGGAGAGGATCTGTC | 1054 | AGGTGAAGACCTCTC | 1055 |
| CAAGAAGAAT | | GAAAAAAAAC | |
| GAGGATCTGTCCAAG | 1056 | GAAGACCTCTCGAAA | 1057 |
| AAGAAT | | AAAAAC | |
| GAGGATCTGTCCAAG | 1058 | GAAGACCTCTCGAAA | 1059 |
| AAGA | | AAAA | |
| GGATCTGTCCAAGAA | 1060 | AGACCTCTCGAAAAA | 1061 |
| GAAT | | AAAC | |
| GTCCAAGAAGAATCC | 1062 | CTCGAAAAAAAACCC | 1063 |
| AATTGCCAAGATA | | TATAGCGAAAATT | |
| GAATCCAATTGCCAA | 1064 | AAACCCTATAGCGAA | 1065 |
| GATA | | AATT | |
| GCAGAAGAAAGAGGA | 1066 | GCTGAGGAGAGGGGT | 1067 |
| CTCAAA | | CTGAAG | |
| GCAGAAGAAAGAGGA | 1068 | GCTGAGGAGAGGGGT | 1069 |
| CTCA | | CTGA | |
| GGAGAACTGAATGTT | 1070 | GGTGAGCTCAACGTA | 1071 |
| ACCA | | ACGA | |
| GGATGCAAGAGGAAA | 1072 | AGACGCTAGGGGTAA | 1073 |
| CAATGT | | TAACGT | |
| GGATGCAAGAGGAAA | 1074 | AGACGCTAGGGGTAA | 1075 |
| CAAT | | TAAC | |
| GATGCAAGAGGAAAC | 1076 | GACGCTAGGGGTAAT | 1077 |
| AATGTAGAGA | | AACGTTGAAA | |
| GATGCAAGAGGAAAC | 1078 | GACGCTAGGGGTAAT | 1079 |
| AATGTA | | AACGTT | |
| GAGGAAACAATGTAG | 1080 | GGGGTAATAACGTTG | 1081 |
| AGAA | | AAAA | |
| GTTCTACCTAAATAA | 1082 | CTTTTATCTTAACAA | 1083 |
| AGATACAGGAGAGA | | GGACACTGGTGAAA | |
| GTGTTACCTTGGACA | 1084 | GCGTAACGTTAGATA | 1085 |
| GAGA | | GGGA | |
| GATGCAGATGAAATA | 1086 | GACGCTGACGAGATT | 1087 |
| GGTTCT | | GGATCA | |
| GATGCAGATGAAATA | 1088 | GACGCTGACGAGATT | 1089 |
| GGTT | | GGAT | |
| GATGAAATAGGTTCT | 1090 | GACGAGATTGGATCA | 1091 |
| GATA | | GACA | |
| GGAGGTTATTTCCAC | 1092 | GGTGGATACTTTCAT | 1093 |
| ATAGAA | | ATTGAG | |
| GAGGTTATTTCCACA | 1094 | GTGGATACTTTCATA | 1095 |
| TAGA | | TTGA | |
| GAAACAGATGCTCAA | 1096 | GAGACTGACGCACAG | 1097 |
| ACTA | | ACAA | |
| GTTAGCGAGAGCATG | 1098 | GTAAGTGAAAGTATG | 1099 |
| GATAGA | | GACAGG | |
| GATCAAGCAAAGGCC | 1100 | GGTCTAGTAAGGGGC | 1101 |
| AAATAA | | AGATTA | |
| GTGGCCATATCAGAA | 1102 | GTCGCGATTTCTGAG | 1103 |
| GATTATCCTAGAAA | | GACTACCCAAGGAA | |
| GTGGCCATATCAGAA | 1104 | GTCGCGATTTCTGAG | 1105 |
| GATTAT | | GACTAC | |
| GTGGCCATATCAGAA | 1106 | GTCGCGATTTCTGAG | 1107 |
| GATT | | GACT | |
| GGCCATATCAGAAGA | 1108 | CGCGATTTCTGAGGA | 1109 |
| TTATCCTAGA | | CTACCCAAGG | |
| GGCCATATCAGAAGA | 1110 | CGCGATTTCTGAGGA | 1111 |
| TTAT | | CTAC | |
| GCCATATCAGAAGAT | 1112 | GCGATTTCTGAGGAC | 1113 |
| TATCCTAGAA | | TACCCAAGGA | |
| GCCATATCAGAAGAT | 1114 | GCGATTTCTGAGGAC | 1115 |
| TATCCT | | TACCCA | |
| GGCACAGTCCTTATC | 1116 | GGGACTGTGCTAATT | 1117 |
| AATGTT | | AACGTA | |
| GCACAGTCCTTATCA | 1118 | GGACTGTGCTAATTA | 1119 |
| ATGT | | ACGT | |
| GGATGGACACCCAAA | 1120 | CGACGGTCATCCTAA | 1121 |
| CAGT | | TAGC | |
| GCTGCTGCAACAAAG | 1122 | CCTCCTCCAGCAGAG | 1123 |
| TGAGAA | | CGAAAA | |
| GCTGCAACAAAGTGA | 1124 | CCTCCAGCAGAGCGA | 1125 |
| GAAA | | AAAG | |
| GGGAAGCACAGCATG | 1126 | GAGAGGCTCAACACG | 1127 |
| ACTCCTATGT | | ATTCGTACGT | |
| GGAAGCACAGCATGA | 1128 | AGAGGCTCAACACGA | 1129 |
| CTCCTA | | TTCGTA | |
| GAAGCACAGCATGAC | 1130 | GAGGCTCAACACGAT | 1131 |
| TCCTAT | | TCGTAC | |
| GAAGCACAGCATGAC | 1132 | GAGGCTCAACACGAT | 1133 |
| TCCT | | TCGT | |
| GCTGCATCCTTGGAA | 1134 | GCTCCACCCATGGAA | 1135 |
| TAATGA | | CAACGA | |
| GCTGCATCCTTGGAA | 1136 | GCTCCACCCATGGAA | 1137 |
| TAAT | | CAAC | |
| GCATCCTTGGAATAA | 1138 | CCACCCATGGAACAA | 1139 |
| TGAA | | CGAG | |
| GAGCACCACCTGAAG | 1140 | GTGCTCCTCCAGAGG | 1141 |
| ACAA | | ATAA | |
| GCCATCATTTCTGCC | 1142 | CCCTTCTTTCCTCCC | 1143 |
| AGTGGATCAA | | TGTCGACCAG | |
| GCCATCATTTCTGCC | 1144 | CCCTTCTTTCCTCCC | 1145 |
| AGTGGA | | TGTCGA | |
| GGGCAGTCTAGTAGG | 1146 | CGGGAGCCTTGTTGG | 1147 |
| AAGAAA | | TAGGAA | |
| GGCAGTCTAGTAGGA | 1148 | GGGAGCCTTGTTGGT | 1149 |
| AGAAAT | | AGGAAC | |
| GCAGTCTAGTAGGAA | 1150 | GGAGCCTTGTTGGTA | 1151 |
| GAAATGGAGTAGGA | | GGAACGGTGTTGGT | |
| GCAGTCTAGTAGGAA | 1152 | GGAGCCTTGTTGGTA | 1153 |
| GAAA | | GGAA | |
| GAAATGGAGTAGGAG | 1154 | GGAACGGTGTTGGTG | 1155 |
| GTAT | | GAAT | |
| GCCAAGGAAGCCACG | 1156 | GCGAAAGAGGCGACC | 1157 |
| ATGAAA | | ATGAAG | |
| GAAGCCACGATGAAA | 1158 | GAGGCGACCATGAAG | 1159 |
| GGAAGTAGCT | | GGTAGCAGTT | |
| GCTGCTGTTGCACTG | 1160 | GCAGCAGTAGCTCTC | 1161 |
| AACGAAGAAT | | AATGAGGAGT | |
| GTTGCACTGAACGAA | 1162 | GTAGCTCTCAATGAG | 1163 |
| GAAT | | GAGT | |
| GAATCGCTGAATGCT | 1164 | GAGTCCCTCAACGCA | 1165 |
| TCTATT | | TCAATA | |
| GGAAATAGTCACTGA | 1166 | AGAGATTGTGACAGA | 1167 |
| AAGA | | GAGG | |
| GAAATAGTCACTGAA | 1168 | GAGATTGTGACAGAG | 1169 |
| AGATCT | | AGGTCA | |
| GAAATAGTCACTGAA | 1170 | GAGATTGTGACAGAG | 1171 |
| AGAT | | AGGT | |
| GAAATGTGATAGCAA | 1172 | GGAACGTCATTGCTA | 1173 |
| CAGA | | CTGA | |
| GATCGAATCCTCTGG | 1174 | GTTCCAACCCACTCG | 1175 |
| AAGGCACTCA | | AGGGGACACA | |
| GAATCCTCTGGAAGG | 1176 | CAACCCACTCGAGGG | 1177 |
| CACTCA | | GACACA | |
| AAGGCACTCAGCATC | 1178 | AGGGGACACAACACC | 1179 |
| TTCAAG | | TACAGG | |

[0116] In some cases, the mammal can have ACM, DCM, left ventricular non-compaction cardiomyopathy (LVNC), or skeletal myopathy, and the gene to be suppressed and replaced can be DES (which encodes desmin). An exemplary DES sequence is set forth in NCBI RefSeq accession number NM_001927 (e.g., version NM_001927.4). A DES polypeptide can, in some cases, have the amino acid sequence set forth in NCBI RefSeq accession number NP_001918 (e.g., version NP_001918.3).

[0117] Examples of shRNA sequences and corresponding shIMM sequences targeted to DES are set forth in TABLE 1K.

TABLE 1K
Representative DES shRNA and
shIMM sequences

| shRNA | SEQ | shIMM | SEQ |
|---|---|---|---|
| Sequence | ID | Sequence | ID |
| GTGAACCAGG | 1180 | GTCAATCAAG | 1181 |
| AGTTTCTGA | | AATTCCTCA | |
| GAGCTCAATG | 1182 | GAACTGAACG | 1183 |
| ACCGCTTCGC | | ATCGGTTTGC | |
| CAACTACAT | | GAATTATAT | |
| GTTGAAGGAA | 1184 | ATTAAAAGAG | 1185 |
| GAAGCAGAGA | | GAGGCTGAAA | |
| ACAAT | | ATAAC | |
| GTTGAAGGAA | 1186 | ATTAAAAGAG | 1187 |
| GAAGCAGAGA | | GAGGCTGAAA | |
| A | | A | |
| GAAGGAAGAA | 1188 | AAAAGAGGAG | 1189 |
| GCAGAGAACA | | GCTGAAAATA | |
| A | | A | |
| GGAAGAAGCA | 1190 | AGAGGAGGCT | 1191 |
| GAGAACAATT | | GAAAATAACT | |
| T | | T | |
| GGAAGAAGCA | 1192 | AGAGGAGGCT | 1193 |
| GAGAACAAT | | GAAAATAAC | |
| GGAGCGCAGA | 1194 | CGAACGGAGG | 1195 |
| ATTGAATCTC | | ATAGAGTCAC | |
| T | | T | |
| GGAGCGCAGA | 1196 | CGAACGGAGG | 1197 |
| ATTGAATCT | | ATAGAGTCA | |
| GAAAGTGCAT | 1198 | AAAGGTCCAC | 1199 |
| GAAGAGGAGA | | GAGGAAGAAA | |
| T | | T | |
| GAACATTTCT | 1200 | AAATATATCA | 1201 |
| GAAGCTGAGG | | GAGGCAGAAG | |
| AGTGGTACA | | AATGGTATA | |
| GAAGCTGAGG | 1202 | GAGGCAGAAG | 1203 |
| AGTGGTACA | | AATGGTATA | |
| GCTGAGGAGT | 1204 | GCAGAAGAAT | 1205 |
| GGTACAAGT | | GGTATAAAT | |
| GGAATACCGA | 1206 | GGAGTATCGT | 1207 |
| CACCAGATCC | | CATCAAATTC | |
| AGTCCTACA | | AATCGTATA | |
| GACACCAGAT | 1208 | GTCATCAAAT | 1209 |
| CCAGTCCTAC | | TCAATCGTAT | |
| A | | A | |
| GTCCTACACC | 1210 | ATCGTATACG | 1211 |
| TGCGAGATTG | | TGTGAAATAG | |
| A | | A | |
| GCACTAACGA | 1212 | GGACAAATGA | 1213 |
| TTCCCTGATG | | CTCGCTCATG | |
| A | | A | |
| GTGGCTACCA | 1214 | GCGGGTATCA | 1215 |
| GGACAACAT | | AGATAATAT | |
| GACCTACTCT | 1216 | AACGTATTCA | 1217 |
| GCCCTCAACT | | GCGCTGAATT | |
| T | | T | |
| GGTTCTGAGG | 1218 | GGATCAGAAG | 1219 |
| TCCATACCA | | TGCACACGA | |
| GAGGTCCATA | 1220 | GAAGTGCACA | 1221 |
| CCAAGAAGAC | | CGAAAAAAAC | |
| GGTGATGAT | | CGTCATGAT | |
| GAGGTCCATA | 1222 | GAAGTGCACA | 1223 |
| CCAAGAAGA | | CGAAAAAAA | |
| GTCCATACCA | 1224 | GTGCACACGA | 1225 |
| AGAAGACGGT | | AAAAAACCGT | |
| GATGA | | CATGA | |

[0118] In some cases, the mammal can have Andersen-Tawil syndrome (ATS) or CPVT, and the gene to be suppressed and replaced can be KCNJ2 (which encodes potassium inwardly rectifying channel subfamily J member 2). An exemplary KCNJ2 sequence is set forth in NCBI RefSeq accession number NM_000891 (e.g., version NM_000891.3). A KCNJ2 polypeptide can, in some cases, have the amino acid sequence set forth in NCBI RefSeq accession number NP_000882 (e.g., version NP_000882.1).

[0119] Examples of shRNA sequences and corresponding shIMM sequences targeted to KCNJ2 are set forth in TABLE 1L.

TABLE 1L
Representative KCNJ2 shRNA
and shIMM sequences

| | SEQ | | SEQ |
|---|---|---|---|
| shRNA Sequence | ID | shIMM Sequence | ID |
| GAACCAACCG | 1226 | GTACGAATCG | 1227 |
| CTACAGCATC | | GTATAGTATT | |
| GTCTCTTCA | | GTGTCATCT | |
| GGGAAGAGTA | 1228 | GGCAAAAGCA | 1229 |
| AAGTCCACAC | | AGGTGCATAC | |
| CCGACAACA | | GCGTCAGCA | |
| GAAGAGTAAA | 1230 | CAAAAGCAAG | 1231 |
| GTCCACACCC | | GTGCATACGC | |
| GACAACAGT | | GTCAGCAAT | |
| GCACAGCTCC | 1232 | GCTCAACTGC | 1233 |
| TCAAATCCAG | | TGAAGTCGAG | |
| AATTACTT | | GATAACAT | |
| GGATCAAATA | 1234 | CGACCAGATT | 1235 |
| GACATCAAT | | GATATTAAC | |
| GGTGTCCCCA | 1236 | CGTCTCGCCT | 1237 |
| ATCACTATA | | ATTACAATT | |
| GAAATAGATG | 1238 | GAGATTGACG | 1239 |
| AAGACAGTCC | | AGGATAGCCC | |
| TTTATATGA | | ATTGTACGA | |
| GATGAAGACA | 1240 | GACGAGGATA | 1241 |
| GTCCTTTATA | | GCCCATTGTA | |
| T | | C | |
| GAAGACAGTC | 1242 | GAGGATAGCC | 1243 |
| CTTTATATGA | | CATTGTACGA | |
| T | | C | |
| GTGCCGTAGC | 1244 | ATGTCGAAGT | 1245 |
| TCTTATCTAG | | TCATACCTTG | |
| CAAATGAAA | | CTAACGAGA | |
| GAAGAGAAGC | 1246 | GAGGAAAAAC | 1247 |
| ACTACTACA | | ATTATTATA | |
| AAGCACTACT | 1248 | AAACATTATT | 1249 |
| ACAAAGTGGA | | ATAAGGTCGA | |
| C | | T | |
| GAGGAAGACG | 1250 | GAAGAGGATG | 1251 |
| ACAGTGAAA | | ATAGCGAGA | |
| GCGAGAGTCG | 1252 | CCGTGAATCC | 1253 |
| GAGATATGA | | GAAATTTGA | |

[0120] In some cases, the mammal can have CPVT, and the gene to be suppressed and replaced can be CASQ2 (which encodes calsequestrin 2). An exemplary CASQ2 sequence is set forth in NCBI RefSeq accession number NM_001232 (e.g., version NM_001232). A CASQ2 polypeptide can, in some cases, have the amino acid sequence set forth in NCBI RefSeq accession number NP_001223.2 (e.g., version NP_001223.2).

[0121] Examples of shRNA sequences and corresponding shIMM sequences targeted to CASQ2 are set forth in TABLE 1M.

TABLE 1M
Representative CASQ2 shRNA
and shIMM sequences

| | SEQ | | SEQ |
|---|---|---|---|
| shRNA Sequence | ID | shIMM Sequence | ID |
| GGGCTTAATT | 1254 | GGCCTAAACT | 1255 |
| TCCCCACATA | | TTCCGACTTA | |
| T | | C | |
| GCTTAATTTC | 1256 | CCTAAACTTT | 1257 |
| CCCACATATG | | CCGACTTACG | |
| A | | A | |
| GCTTAATTTC | 1258 | CCTAAACTTT | 1259 |
| CCCACATAT | | CCGACTTAC | |
| GATGGGAAGG | 1260 | GACGGCAAAG | 1261 |
| ACCGAGTGGT | | ATCGTGTCGT | |
| AAGTCTTT | | TAGCCTAT | |
| GGGAAGGACC | 1262 | GGCAAAGATC | 1263 |
| GAGTGGTAAG | | GTGTCGTTAG | |
| TCTTT | | CCTAT | |
| GAAGGACCGA | 1264 | CAAAGATCGT | 1265 |
| GTGGTAAGTC | | GTCGTTAGCC | |
| T | | T | |
| GAAGGACCGA | 1266 | CAAAGATCGT | 1267 |
| GTGGTAAGT | | GTCGTTAGC | |
| GGACCGAGTG | 1268 | AGATCGTGTC | 1269 |
| GTAAGTCTT | | GTTAGCCTA | |
| GACCGAGTGG | 1270 | GATCGTGTCG | 1271 |
| TAAGTCTTT | | TTAGCCTAT | |
| GGCCCAGGTC | 1272 | CGCGCAAGTG | 1273 |
| CTTGAACATA | | CTAGAGCACA | |
| A | | A | |
| GCCCAGGTCC | 1274 | GCGCAAGTGC | 1275 |
| TTGAACATA | | TAGAGCACA | |
| GTCCTTGAAC | 1276 | GTGCTAGAGC | 1277 |
| ATAAAGCTAT | | ACAAGGCAAT | |
| A | | T | |
| GGTGGATGCC | 1278 | GGTCGACGCG | 1279 |
| AAGAAAGAA | | AAAAAGGAG | |
| GATGAAGAAG | 1280 | GACGAGGAGG | 1281 |
| GAAGCCTGTA | | GTAGTCTCTA | |
| T | | C | |
| GAAGAAGGAA | 1282 | GAGGAGGGTA | 1283 |
| GCCTGTATAT | | GTCTCTACAT | |
| T | | A | |
| GAAGAAGGAA | 1284 | GAGGAGGGTA | 1285 |
| GCCTGTATA | | GTCTCTACA | |
| AAGGAAGCCT | 1286 | AGGGTAGTCT | 1287 |
| GTATATTCTT | | CTACATACTA | |
| A | | A | |
| GGAAGCCTGT | 1288 | GGTAGTCTCT | 1289 |
| ATATTCTTA | | ACATACTAA | |
| GAAGCCTGTA | 1290 | GTAGTCTCTA | 1291 |
| TATTCTTAA | | CATACTAAA | |
| GGTGATCGCA | 1292 | GGAGACCGGA | 1293 |
| CAATAGAGT | | CTATTGAAT | |
| GGTGGAGTTC | 1294 | AGTCGAATTT | 1295 |
| CTCTTGGATC | | CTGTTAGACC | |
| TAATT | | TTATA | |
| GTGGAGTTCC | 1296 | GTCGAATTTC | 1297 |
| TCTTGGATCT | | TGTTAGACCT | |
| A | | T | |
| GGAGTTCCTC | 1298 | CGAATTTCTG | 1299 |
| TTGGATCTAA | | TTAGACCTTA | |
| T | | T | |
| GGAGTTCCTC | 1300 | CGAATTTCTG | 1301 |
| TTGGATCTA | | TTAGACCTT | |
| GAGTTCCTCT | 1302 | GAATTTCTGT | 1303 |
| TGGATCTAAT | | TAGACCTTAT | |
| T | | A | |
| GAGTTCCTCT | 1304 | GAATTTCTGT | 1305 |
| TGGATCTAA | | TAGACCTTA | |
| GTTCCTCTTG | 1306 | ATTTCTGTTA | 1307 |
| GATCTAATTG | | GACCTTATAG | |
| A | | A | |
| GTTCCTCTTG | 1308 | ATTTCTGTTA | 1309 |
| GATCTAATT | | GACCTTATA | |
| GAAGACCCAG | 1310 | GAGGATCCTG | 1311 |
| TGGAGATCA | | TCGAAATTA | |
| GACCCAGTGG | 1312 | GATCCTGTCG | 1313 |
| AGATCATCA | | AAATTATTA | |
| GCCTTACATC | 1314 | ACCATATATT | 1315 |
| AAATTCTTT | | AAGTTTTTC | |
| GGTTGCAAAG | 1316 | CGTAGCTAAA | 1317 |
| AAATTATCT | | AAGTTGTCA | |
| GAAGATGAAT | 1318 | AAAAATGAAC | 1319 |
| GAGGTTGACT | | GAAGTAGATT | |
| T | | T | |
| GATGAATGAG | 1320 | AATGAACGAA | 1321 |
| GTTGACTTCT | | GTAGATTTTT | |
| A | | A | |
| GAATGAGGTT | 1322 | GAACGAAGTA | 1323 |
| GACTTCTAT | | GATTTTTAC | |
| GAGCCCATTG | 1324 | GAACCGATAG | 1325 |
| CCATCCCCAA | | CGATTCCGAA | |
| CAAACCTTA | | TAAGCCATA | |
| GCCCATTGCC | 1326 | ACCGATAGCG | 1327 |
| ATCCCCAACA | | ATTCCGAATA | |
| AACCTTACA | | AGCCATATA | |
| GCAGAGAAGA | 1328 | GCTGAAAAAA | 1329 |
| GTGATCCAGA | | GCGACCCTGA | |
| TGGCTACGA | | CGGGTATGA | |
| GACAATACTG | 1330 | GATAACACAG | 1331 |
| ACAACCCCGA | | ATAATCCGGA | |
| TCTGA | | CCTCA | |
| GTTGCCTACT | 1332 | GTAGCGTATT | 1333 |
| GGGAGAAGAC | | GGGAAAAAAC | |
| TTTCAAGAT | | ATTTAAAAT | |
| GTTGCCTACT | 1334 | GTAGCGTATT | 1335 |
| GGGAGAAGAC | | GGGAAAAAAC | |
| T | | A | |
| GTTGCCTACT | 1336 | GTAGCGTATT | 1337 |
| GGGAGAAGA | | GGGAAAAAA | |
| GCCTACTGGG | 1338 | GCGTATTGGG | 1339 |
| AGAAGACTTT | | AAAAAACATT | |
| CAAGA | | TAAAA | |
| GCCTACTGGG | 1340 | GCGTATTGGG | 1341 |
| AGAAGACTT | | AAAAAACAT | |
| GGGAGAAGAC | 1342 | GGGAAAAAAC | 1343 |
| TTTCAAGAT | | ATTTAAAAT | |
| GGAGAAGACT | 1344 | GGAAAAAACA | 1345 |
| TTCAAGATT | | TTTAAAATA | |
| GGAAAGATAA | 1346 | GGTAAAATTA | 1347 |
| ACACTGAAGA | | ATACAGAGGA | |
| T | | C | |
| GGAAAGATAA | 1348 | GGTAAAATTA | 1349 |
| ACACTGAAGA | | ATACAGAGGA | |
| TGATGATGA | | CGACGACGA | |
| GAAAGATAAA | 1350 | GTAAAATTAA | 1351 |
| CACTGAAGAT | | TACAGAGGAC | |
| GATGA | | GACGA | |
| GAAAGATAAA | 1352 | GTAAAATTAA | 1353 |
| CACTGAAGA | | TACAGAGGA | |
| GAAGAGGATA | 1354 | GAGGAAGACA | 1355 |
| ATGATGACAG | | ACGACGATAG | |
| T | | C | |
| GAGGATAATG | 1356 | GAAGACAACG | 1357 |
| ATGACAGTGA | | ACGATAGCGA | |
| T | | C | |
| GGATAATGAT | 1358 | AGACAACGAC | 1359 |
| GACAGTGAT | | GATAGCGAC | |

[0122] In some cases, the mammal can have DCM, and the gene to be suppressed and replaced can be LMNA (which encodes lamin A/C). An exemplary LMNA sequence is set forth in NCBI RefSeq accession number NM_170707 (e.g., version NM_170707.4). A LMNA polypeptide can, in some cases, have the amino acid sequence set forth in NCBI RefSeq accession number NP_733821 (e.g., version NP_733821.1).

[0123] Examples of shRNA sequences and corresponding shIMM sequences targeted to LMNA are set forth in TABLE 1N.

TABLE 1N
Representative LMNA shRNA and
shIMM sequences

| | SEQ | | SEQ |
|---|---|---|---|
| shRNA Sequence | ID | shIMM Sequence | ID |
| GAGCTCAATG | 1360 | GAACTGAACG | 1361 |
| ATCGCTTGGC | | ACCGGTTAGC | |
| GGTCTACAT | | CGTGTATAT | |
| GGAGCTGAGC | 1362 | CGAACTCAGT | 1363 |
| AAAGTGCGTG | | AAGGTCCGAG | |
| AGGAGTTTA | | AAGAATTCA | |
| GAGCTGAGCA | 1364 | GAACTCAGTA | 1365 |
| AAGTGCGTGA | | AGGTCCGAGA | |
| GGAGTTTAA | | AGAATTCAA | |
| GCTGAGCAAA | 1366 | ACTCAGTAAG | 1367 |
| GTGCGTGAGG | | GTCCGAGAAG | |
| AGTTT | | AATTC | |
| GAGCAAAGTG | 1368 | CAGTAAGGTC | 1369 |
| CGTGAGGAGT | | CGAGAAGAAT | |
| T | | T | |
| GCAAAGTGCG | 1370 | GTAAGGTCCG | 1371 |
| TGAGGAGTTT | | AGAAGAATTC | |
| A | | A | |
| GCAAAGTGCG | 1372 | GTAAGGTCCG | 1373 |
| TGAGGAGTT | | AGAAGAATT | |
| GCAATACCAA | 1374 | GGAACACGAA | 1375 |
| GAAGGAGGGT | | AAAAGAAGGA | |
| GACCT | | GATCT | |
| GCATGAGGAC | 1376 | ACACGAAGAT | 1377 |
| CAGGTGGAGC | | CAAGTCGAAC | |
| AGTATAAGA | | AATACAAAA | |
| GAGGACCAGG | 1378 | GAAGATCAAG | 1379 |
| TGGAGCAGTA | | TCGAACAATA | |
| TAAGA | | CAAAA | |
| GGACCAGGTG | 1380 | AGATCAAGTC | 1381 |
| GAGCAGTATA | | GAACAATACA | |
| A | | A | |
| GACCAGGTGG | 1382 | GATCAAGTCG | 1383 |
| AGCAGTATA | | AACAATACA | |
| AAGCTGGACA | 1384 | AAACTCGATA | 1385 |
| ATGCCAGGCA | | ACGCGAGACA | |
| G | | A | |
| GACCAGTCCA | 1386 | GATCAATCGA | 1387 |
| TGGGCAATTG | | TGGGGAACTG | |
| GCAGATCAA | | GCAAATTAA | |
| GGCAGATCAA | 1388 | GGCAAATTAA | 1389 |
| GCGCCAGAAT | | ACGGCAAAAC | |
| GGAGATGA | | GGTGACGA | |
| GCGCCAGAAT | 1390 | ACGGCAAAAC | 1391 |
| GGAGATGAT | | GGTGACGAC | |
| GATGATCCCT | 1392 | GACGACCCGT | 1393 |
| TGCTGACTT | | TACTCACAT | |
| GGATGAGGAT | 1394 | AGACGAAGAC | 1395 |
| GGAGATGACC | | GGTGACGATC | |
| T | | T | |

[0124] In some cases, the mammal can have DCM, and the gene to be suppressed and replaced can be TPM1 (which encodes tropomyosin 1). An exemplary TPM1 sequence is set forth in NCBI RefSeq accession number NM_001018005 (e.g., version NM_001018005.2). A TPM1 polypeptide can, in some cases, have the amino acid sequence set forth in NCBI RefSeq accession number NP_001018005 (e.g., version NP_001018005.1).

[0125] Examples of shRNA sequences and corresponding shIMM sequences targeted to TPM1 are set forth in TABLE 10.

TABLE 10
Representative TPM1 shRNA and
shIMM sequences

| | SEQ | | SEQ |
|---|---|---|---|
| shRNA Sequence | ID | shIMM Sequence | ID |
| GAAGACAGGA | 1396 | GAGGATAGAA | 1397 |
| GCAAGCAGCT | | GTAAACAACT | |
| GGAAGATGA | | CGAGGACGA | |
| AAGCTGAGAA | 1398 | AGGCAGAAAA | 1399 |
| GGCAGCAGAT | | AGCTGCTGAC | |
| G | | G | |
| GAGAAGGCAG | 1400 | GAAAAAGCTG | 1401 |
| CAGATGAGAG | | CTGACGAAAG | |
| TGAGA | | CGAAA | |
| GAGAAGGCAG | 1402 | GAAAAAGCTG | 1403 |
| CAGATGAGA | | CTGACGAAA | |
| GAAGGCAGCA | 1404 | AAAAGCTGCT | 1405 |
| GATGAGAGTG | | GACGAAAGCG | |
| A | | A | |
| GCAGCAGATG | 1406 | GCTGCTGACG | 1407 |
| AGAGTGAGA | | AAAGCGAAA | |
| GCAGATGAGA | 1408 | GCTGACGAAA | 1409 |
| GTGAGAGAGG | | GCGAAAGGGG | |
| CATGAAAGT | | GATGAAGGT | |
| GCAAATGTGC | 1410 | GGAAGTGCGC | 1411 |
| CGAGCTTGAA | | GGAACTAGAG | |
| GAAGAAT | | GAGGAGT | |
| GAAGGAAGAC | 1412 | AAAAGAGGAT | 1413 |
| AGATATGAGG | | AGGTACGAAG | |
| AAGAGATCA | | AGGAAATTA | |
| AAGACGAGCT | 1414 | AGGATGAACT | 1415 |
| GTACGCTCAG | | CTATGCACAA | |
| A | | A | |

[0126] In some cases, the mammal can have DCM or ACM, and the gene to be suppressed and replaced can be PLN (which encodes phospholamban). An exemplary PLN sequence is set forth in NCBI RefSeq accession number NM_002667 (e.g., version NM_002667.5). A PLN polypeptide can, in some cases, have the amino acid sequence set forth in NCBI RefSeq accession number NP_002658 (e.g., version NP_002658.1).

[0127] Examples of shRNA sequences and corresponding shIMM sequences targeted to PLN are set forth in TABLE 1P.

TABLE 1P
Representative PLN shRNA
and shIMM sequences

| | SEQ | | SEQ |
|---|---|---|---|
| shRNA Sequence | ID | shIMM Sequence | ID |
| AAGAGCCTCA | 1416 | GAGGGCGTCT | 1417 |
| ACCATTGAAA | | ACGATAGAGA | |
| T | | T | |
| AACCATTGAA | 1418 | TACGATAGAG | 1419 |
| ATGCCTCAAC | | ATGCCACAGC | |
| A | | A | |
| AATGCCTCAA | 1420 | GATGCCACAG | 1421 |
| CAAGCACGTC | | CAGGCTCGAC | |
| A | | A | |
| TCAATTTCTG | 1422 | TTAACTTTTG | 1423 |
| TCTCATCTTA | | CCTGATTTTG | |
| A | | A | |
| TGTCTCTTGC | 1424 | TGCCTGTTAC | 1425 |
| TGATCTGTAT | | TCATTTGCAT | |
| C | | T | |
| GTCTCTTGCT | 1426 | GCCTGTTACT | 1427 |
| GATCTGTAT | | CATTTGCAT | |

[0128] In some cases, the mammal can have familial hypercholesterolemia (FH), and the gene to be suppressed and replaced can be LDLR (which encodes the low density lipoprotein receptor). An exemplary LDLR sequence is set forth in NCBI RefSeq accession number NM_000527 (e.g., version NM_000527.5). A LDLR polypeptide can, in some cases, have the amino acid sequence set forth in NCBI RefSeq accession number NP_000518 (e.g., version NP_000518.1).

[0129] Examples of shRNA sequences and corresponding shIMM sequences targeted to LDLR are set forth in TABLE 1Q.

TABLE 1Q
Representative LDLR shRNA and
shIMM sequences

| | SEQ | | SEQ |
|---|---|---|---|
| shRNA Sequence | ID | shIMM Sequence | ID |
| GTGCCAAGAC | 1428 | ATGTCAGGAT | 1429 |
| GGGAAATGCA | | GGCAAGTGTA | |
| TCTCCTACA | | TTTCGTATA | |
| GCCAAGACGG | 1430 | GTCAGGATGG | 1431 |
| GAAATGCATC | | CAAGTGTATT | |
| TCCTA | | TCGTA | |
| GACGGGAAAT | 1432 | GATGGCAAGT | 1433 |
| GCATCTCCTA | | GTATTTCGTA | |
| CAAGT | | TAAAT | |
| GACGGGAAAT | 1434 | GATGGCAAGT | 1435 |
| GCATCTCCT | | GTATTTCGT | |
| GGGAAATGCA | 1436 | GGCAAGTGTA | 1437 |
| TCTCCTACA | | TTTCGTATA | |
| GGAAATGCAT | 1438 | GCAAGTGTAT | 1439 |
| CTCCTACAAG | | TTCGTATAAA | |
| T | | T | |
| GGAAATGCAT | 1440 | GCAAGTGTAT | 1441 |
| CTCCTACAA | | TTCGTATAA | |
| GTCAACCGCT | 1442 | GTGAATCGGT | 1443 |
| GCATTCCTCA | | GTATACCACA | |
| GTTCT | | ATTTT | |
| GCAGTTCGTC | 1444 | CCAATTTGTG | 1445 |
| TGTGACTCA | | TGCGATTCT | |
| GAAGATGGCT | 1446 | GAGGACGGGT | 1447 |
| CGGATGAGT | | CCGACGAAT | |
| GACGAATTCC | 1448 | GATGAGTTTC | 1449 |
| AGTGCTCTGA | | AATGTTCAGA | |
| T | | C | |
| GGACATGAGC | 1450 | AGATATGAGT | 1451 |
| GATGAAGTT | | GACGAGGTA | |
| GCGAATGCAT | 1452 | GGGAGTGTAT | 1453 |
| CACCCTGGAC | | TACGCTCGAT | |
| AAAGT | | AAGGT | |
| GCATCACCCT | 1454 | GTATTACGCT | 1455 |
| GGACAAAGT | | CGATAAGGT | |
| GCTACAAGTG | 1456 | GGTATAAATG | 1457 |
| CCAGTGTGA | | TCAATGCGA | |
| GACCTGTCCC | 1458 | GATCTCTCGC | 1459 |
| AGAGAATGA | | AAAGGATGA | |
| GAGAATGATC | 1460 | AAGGATGATT | 1461 |
| TGCAGCACCC | | TGTAGTACGC | |
| AGCTTGACA | | AACTAGATA | |
| GGATCCACAG | 1462 | GGATTCATAG | 1463 |
| CAACATCTAC | | TAATATTTAT | |
| T | | T | |
| GGATCCACAG | 1464 | GGATTCATAG | 1465 |
| CAACATCTA | | TAATATTTA | |
| GCAACATCTA | 1466 | GTAATATTTA | 1467 |
| CTGGACCGAC | | TTGGACGGAT | |
| TCTGT | | TCAGT | |
| GCTTCATGTA | 1468 | GGTTTATGTA | 1469 |
| CTGGACTGAC | | TTGGACAGAT | |
| T | | T | |
| GCTTCATGTA | 1470 | GGTTTATGTA | 1471 |
| CTGGACTGA | | TTGGACAGA | |
| GGACATCTAC | 1472 | CGATATTTAT | 1473 |
| TCGCTGGTGA | | TCCCTCGTCA | |
| CTGAA | | CAGAG | |
| GCATCACCCT | 1474 | GGATTACGCT | 1475 |
| AGATCTCCT | | TGACCTGCT | |
| GACGTTGCTG | 1476 | GATGTAGCAG | 1477 |
| GCAGAGGAAA | | GGAGGGGTAA | |
| TGAGAAGAA | | CGAAAAAAA | |
| GACGTTGCTG | 1478 | GATGTAGCAG | 1479 |
| GCAGAGGAAA | | GGAGGGGTAA | |
| TGAGA | | CGAAA | |
| GTTGCTGGCA | 1480 | GTAGCAGGGA | 1481 |
| GAGGAAATGA | | GGGGTAACGA | |
| GAAGA | | AAAAA | |
| GAACATCAAC | 1482 | AAATATTAAT | 1483 |
| AGCATCAACT | | AGTATTAATT | |
| T | | T | |
| GAGGATGAGG | 1484 | GAAGACGAAG | 1485 |
| TCCACATTT | | TGCATATAT | |

[0130] In some cases, the mammal can have FH, and the gene to be suppressed and replaced can be PCSK9 (which encodes proprotein convertase subtilisin/kexin type 9). An exemplary PCSK9 sequence is set forth in NCBI RefSeq accession number NM_174936 (e.g., version NM_174936.4). A PCSK9 polypeptide can, in some cases, have the amino acid sequence set forth in NCBI RefSeq accession number NP_777596 (e.g., version NP_777596.2).

[0131] Examples of shRNA sequences and corresponding shIMM sequences targeted to PCSK9 are set forth in TABLE 1R.

TABLE 1R
Representative PCSK9 shRNA and
shIMM sequences

| | SEQ | | SEQ |
|---|---|---|---|
| shRNA Sequence | ID | shIMM Sequence | ID |
| GAGGTGTATC | 1486 | GAAGTCTACC | 1487 |
| TCCTAGACA | | TGCTTGATA | |
| GGTCTGGAAT | 1488 | GGACTCGAGT | 1489 |
| GCAAAGTCA | | GTAAGGTGA | |
| AATGCAAAGT | 1490 | AGTGTAAGGT | 1491 |
| CAAGGAGCAT | | GAAAGAACAC | |
| G | | G | |
| AAAGTCAAGG | 1492 | AAGGTGAAAG | 1493 |
| AGCATGGAAT | | AACACGGTAT | |
| C | | T | |
| AAGGATCCGT | 2757 | AAAGACCCCT | 2758 |
| GGAGGTTGCC | | GGAGATTACC | |
| T | | A | |
| AAGATCCTGC | 2759 | AAAATTCTCC | 2760 |
| ATGTCTTCCA | | ACGTGTTTCA | |
| T | | C | |
| GGTCACCGAC | 2761 | GGTGACGGAT | 2762 |
| TTCGAGAATG | | TTTGAAAACG | |
| T | | T | |
| GCACCCTCAT | 2763 | GGACGCTGAT | 2764 |
| AGGCCTGGAG | | TGGGCTCGAA | |
| TTTAT | | TTCAT | |
| GAGTTGAGGC | 2765 | GAATTAAGAC | 2766 |
| AGAGACTGA | | AAAGGCTCA | |
| GAGGCAGAGA | 2767 | AAGACAAAGG | 2768 |
| CTGATCCACT | | CTCATTCATT | |
| T | | T | |
| GGCAGAGACT | 2769 | GACAAAGGCT | 2770 |
| GATCCACTTC | | CATTCATTTT | |
| T | | T | |
| GGCAGAGACT | 2771 | GACAAAGGCT | 2772 |
| GATCCACTT | | CATTCATTT | |
| AACTGCAGCG | 2773 | AATTGTAGTG | 2774 |
| TCCACACAGC | | TGCATACTGC | |
| T | | A | |

[0132] In some cases, the mammal can have HCM or DCM, and the gene to be suppressed and replaced can be TNNT2 (which encodes cardiac type troponin T2). An exemplary TNNT2 sequence is set forth in NCBI RefSeq accession number NM_001276345 (e.g., version NM_001276345.2). A TNNT2 polypeptide can, in some cases, have the amino acid sequence set forth in NCBI RefSeq accession number NP_001263274 (e.g., version NP_001263274.1).

[0133] Examples of shRNA sequences and corresponding shIMM sequences targeted to TNNT2 are set forth in TABLE 1S.

TABLE 1S
Representative TNNT2 shRNA and
shIMM sequences

| | SEQ | | SEQ |
|---|---|---|---|
| shRNA Sequence | ID | shIMM Sequence | ID |
| GGAGCAGGAA | 1494 | AGAACAAGAG | 1495 |
| GAAGCAGCTG | | GAGGCTGCAG | |
| TTGAA | | TAGAG | |
| GAGCAGGAAG | 1496 | GAACAAGAGG | 1497 |
| AAGCAGCTGT | | AGGCTGCAGT | |
| TGAAGAAGA | | AGAGGAGGA | |
| GCAGGAAGAA | 1498 | ACAAGAGGAG | 1499 |
| GCAGCTGTTG | | GCTGCAGTAG | |
| A | | A | |
| GGAAGAAGCA | 1500 | AGAGGAGGCT | 1501 |
| GCTGTTGAA | | GCAGTAGAG | |
| AAGAGGAGGA | 1502 | AGGAAGAAGA | 1503 |
| CTGGAGAGAG | | TTGGAGGGAA | |
| G | | G | |
| GGAGACCAGG | 1504 | AGAAACGAGA | 1505 |
| GCAGAAGAAG | | GCTGAGGAGG | |
| ATGAA | | ACGAG | |
| GACCAGGGCA | 1506 | AACGAGAGCT | 1507 |
| GAAGAAGATG | | GAGGAGGACG | |
| AAGAA | | AGGAG | |
| GACCAGGGCA | 1508 | AACGAGAGCT | 1509 |
| GAAGAAGATG | | GAGGAGGACG | |
| AAGAAGAA | | AGGAGGAG | |
| GGGCAGAAGA | 1510 | GAGCTGAGGA | 1511 |
| AGATGAAGAA | | GGACGAGGAG | |
| GAAGA | | GAGGA | |
| GGCAGAAGAA | 1512 | AGCTGAGGAG | 1513 |
| GATGAAGAAG | | GACGAGGAGG | |
| A | | A | |
| GGCAGAAGAA | 1514 | AGCTGAGGAG | 1515 |
| GATGAAGAA | | GACGAGGAG | |
| GCAGAAGAAG | 1516 | GCTGAGGAGG | 1517 |
| ATGAAGAAGA | | ACGAGGAGGA | |
| A | | G | |
| AAGATGAAGA | 1518 | AGGACGAGGA | 1519 |
| AGAAGAGGAA | | GGAGGAAGAG | |
| G | | G | |
| GAAGAAGAAG | 1520 | GAGGAGGAGG | 1521 |
| AGGAAGCAAA | | AAGAGGCTAA | |
| G | | A | |
| AAGCAAAGGA | 1522 | AGGCTAAAGA | 1523 |
| GGCTGAAGAT | | AGCAGAGGAC | |
| G | | G | |
| GAAGCGCATG | 1524 | CAAACGGATG | 1525 |
| GAGAAGGACC | | GAAAAAGATC | |
| TGAATGAGT | | TCAACGAAT | |
| AGCTGTGGCA | 1526 | AACTCTGGCA | 1527 |
| GAGCATCTAT | | AAGTATTTAC | |
| A | | A | |

[0134] In some cases, the mammal can have LQTS or CPVT, and the gene to be suppressed and replaced can be CALM1 (which encodes calmodulin 1). An exemplary CALM1 sequence is set forth in NCBI RefSeq accession number NM_006888 (e.g., version NM_006888.6). A CALM1 polypeptide can, in some cases, have the amino acid sequence set forth in NCBI RefSeq accession number NP_008819 (e.g., version NP_008819.1).

[0135] Examples of shRNA sequences and corresponding shIMM sequences targeted to CALM1 are set forth in TABLE 1T.

TABLE 1T
Representative CALMI shRNA and
shIMM sequences

| | SEQ | | SEQ |
|---|---|---|---|
| shRNA Sequence | ID | shIMM Sequence | ID |
| AAGAACAGAT | 1528 | AGGAGCAAAT | 1529 |
| TGCTGAATTC | | AGCAGAGTTT | |
| A | | A | |
| GAAAGATACA | 1530 | GAAGGACACT | 1531 |
| GATAGTGAAG | | GACAGCGAGG | |
| AAGAA | | AGGAG | |
| AAGATACAGA | 1532 | AGGACACTGA | 1533 |
| TAGTGAAGAA | | CAGCGAGGAG | |
| G | | G | |
| GATGAAGAAG | 1534 | GACGAGGAGG | 1535 |
| TAGATGAAAT | | TTGACGAGAT | |
| GATCAGAGA | | GATTAGGGA | |
| GATGAAGAAG | 1536 | GACGAGGAGG | 1537 |
| TAGATGAAAT | | TTGACGAGAT | |
| GATCA | | GATTA | |
| AAGTAGATGA | 1538 | AGGTTGACGA | 1539 |
| AATGATCAGA | | GATGATTAGG | |
| G | | G | |

[0136] In some cases, the mammal can have LQTS or CPVT, and the gene to be suppressed and replaced can be CALM2 (which encodes calmodulin 2). An exemplary CALM2 sequence is set forth in NCBI RefSeq accession number NM_001743 (e.g., version NM_001743.6). A CALM2 polypeptide can, in some cases, have the amino acid sequence set forth in NCBI RefSeq accession number NP_001734 (e.g., version NP_001734.1).

[0137] Examples of shRNA sequences and corresponding shIMM sequences targeted to CALM2 are set forth in TABLE 1U.

TABLE 1U
Representative CALM2 shRNA and
shIMM sequences

| | SEQ | | SEQ |
|---|---|---|---|
| shRNA Sequence | ID | shIMM Sequence | ID |
| GGCTGACCAA | 1540 | GGCAGATCAG | 1541 |
| CTGACTGAA | | CTCACAGAG | |
| AAGAGCAGAT | 1542 | AGGAACAAAT | 1543 |
| TGCAGAATTC | | AGCTGAGTTT | |
| A | | A | |
| GAGCAGATTG | 1544 | GAACAAATAG | 1545 |
| CAGAATTCAA | | CTGAGTTTAA | |
| A | | G | |
| GAGCAGATTG | 1546 | GAACAAATAG | 1547 |
| CAGAATTCA | | CTGAGTTTA | |
| GCAGATTGCA | 1548 | ACAAATAGCT | 1549 |
| GAATTCAAAG | | GAGTTTAAGG | |
| A | | A | |
| GCAGATTGCA | 1550 | ACAAATAGCT | 1551 |
| GAATTCAAA | | GAGTTTAAG | |
| GACAAAGATG | 1552 | GATAAGGACG | 1553 |
| GTGATGGAAC | | GAGACGGTAC | |
| TATAA | | AATTA | |
| AAAGATGGTG | 1554 | AAGGACGGAG | 1555 |
| ATGGAACTAT | | ACGGTACAAT | |
| A | | T | |
| AAGATGGTGA | 1556 | AGGACGGAGA | 1557 |
| TGGAACTATA | | CGGTACAATT | |
| A | | A | |
| GGCAGAATCC | 1558 | GCCAAAACCC | 1559 |
| CACAGAAGCA | | GACTGAGGCT | |
| GAGTT | | GAATT | |
| GCAGAATCCC | 1560 | CCAAAACCCG | 1561 |
| ACAGAAGCAG | | ACTGAGGCTG | |
| AGTTA | | AATTG | |
| GAATCCCACA | 1562 | AAACCCGACT | 1563 |
| GAAGCAGAGT | | GAGGCTGAAT | |
| T | | T | |
| GAAGTAGATG | 1564 | GAGGTTGACG | 1565 |
| CTGATGGTAA | | CAGACGGAAA | |
| T | | C | |
| AAGTAGATGC | 1566 | AGGTTGACGC | 1567 |
| TGATGGTAAT | | AGACGGAAAC | |
| G | | G | |
| GCTGATGGTA | 1568 | GCAGACGGAA | 1569 |
| ATGGCACAAT | | ACGGGACTAT | |
| TGACT | | AGATT | |
| GCTGATGGTA | 1570 | GCAGACGGAA | 1571 |
| ATGGCACAAT | | ACGGGACTAT | |
| T | | A | |
| GGTAATGGCA | 1572 | GGAAACGGGA | 1573 |
| CAATTGACT | | CTATAGATT | |
| GGAGAGAAGT | 1574 | GGTGAAAAAT | 1575 |
| TAACAGATGA | | TGACTGACGA | |
| AGAAGTTGA | | GGAGGTAGA | |
| GAGAGAAGTT | 1576 | GTGAAAAATT | 1577 |
| AACAGATGAA | | GACTGACGAG | |
| GAAGT | | GAGGT | |
| GAGAAGTTAA | 1578 | GAAAAATTGA | 1579 |
| CAGATGAAGA | | CTGACGAGGA | |
| AGTTGATGA | | GGTAGACGA | |

[0138] In some cases, the mammal can have LQTS or CPVT, and the gene to be suppressed and replaced can be CALM3 (which encodes calmodulin 3). An exemplary CALM3 sequence is set forth in NCBI RefSeq accession number NM_005184 (e.g., version NM_005184.4). A CALM3 polypeptide can, in some cases, have the amino acid sequence set forth in NCBI RefSeq accession number NP_005175.2 (e.g., version NP_005175.2).

[0139] Examples of shRNA sequences and corresponding shIMM sequences targeted to CALM3 are set forth in TABLE 1V.

TABLE 1V
Representative CALM3 shRNA and
shIMM sequences

| | SEQ | | SEQ |
|---|---|---|---|
| shRNA Sequence | ID | shIMM Sequence | ID |
| GCTGACTGAG | 1580 | ACTCACAGAA | 1581 |
| GAGCAGATTG | | GAACAAATAG | |
| CAGAGTTCA | | CTGAATTTA | |
| GAGCAGATTG | 1582 | GAACAAATAG | 1583 |
| CAGAGTTCA | | CTGAATTTA | |
| GACAAGGATG | 1584 | GATAAAGACG | 1585 |
| GAGATGGCAC | | GTGACGGGAC | |
| TATCA | | AATTA | |
| AAGGATGGAG | 1586 | AAAGACGGTG | 1587 |
| ATGGCACTAT | | ACGGGACAAT | |
| C | | T | |
| GATGGAGATG | 1588 | GACGGTGACG | 1589 |
| GCACTATCA | | GGACAATTA | |
| GGAGATGGCA | 1590 | GGTGACGGGA | 1591 |
| CTATCACCAC | | CAATTACGAC | |
| CAAGGAGTT | | GAAAGAATT | |
| AAGCAGAGCT | 1592 | AGGCTGAACT | 1593 |
| GCAGGATATG | | CCAAGACATG | |
| A | | A | |
| GCTGCAGGAT | 1594 | ACTCCAAGAC | 1595 |
| ATGATCAATG | | ATGATTAACG | |
| A | | A | |
| AAAGATGAAG | 1596 | GAAAATGAAA | 1597 |
| GACACAGACA | | GATACTGATA | |
| G | | G | |
| AAGATGAAGG | 1598 | AAAATGAAAG | 1599 |
| ACACAGACAG | | ATACTGATAG | |
| T | | C | |
| AAGGACACAG | 1600 | AAAGATACTG | 1601 |
| ACAGTGAGGA | | ATAGCGAAGA | |
| G | | A | |
| AAGCTGACCG | 1602 | AAACTCACGG | 1603 |
| ATGAGGAGGT | | ACGAAGAAGT | |
| G | | C | |
| GACCGATGAG | 1604 | CACGGACGAA | 1605 |
| GAGGTGGATG | | GAAGTCGACG | |
| AGATGATCA | | AAATGATTA | |
| GATGAGGAGG | 1606 | GACGAAGAAG | 1607 |
| TGGATGAGAT | | TCGACGAAAT | |
| GATCA | | GATTA | |
| GAGGAGGTGG | 1608 | GAAGAAGTCG | 1609 |
| ATGAGATGA | | ACGAAATGA | |
| GAGGTGGATG | 1610 | GAAGTCGACG | 1611 |
| AGATGATCA | | AAATGATTA | |

[0140] In some cases, the mammal can have Triadin Knockout Syndrome (TKOS), and the gene to be suppressed and replaced can be TRDN (which encodes triadin). An exemplary TRDN sequence is set forth in NCBI RefSeq accession number NM_006073 (e.g., version NM_006073.4). A TRDN polypeptide can, in some cases, have the amino acid sequence set forth in NCBI RefSeq accession number NP_006064 (e.g., version NP_006064.2).

[0141] Examples of shRNA sequences and corresponding shIMM sequences targeted to CALM3 are set forth in TABLE 1W.

TABLE 1W
Representative TRDN shRNA and
shIMM sequences

| | SEQ | | SEQ |
|---|---|---|---|
| shRNA Sequence | ID | shIMM Sequence | ID |
| GTGCTGAAGA | 1612 | GTCCTCAAAA | 1613 |
| GGACAGTCAC | | GAACTGTGAC | |
| AGAAGACAT | | TGAGGATAT | |
| GTGCTGAAGA | 1614 | GTCCTCAAAA | 1615 |
| GGACAGTCAC | | GAACTGTGAC | |
| A | | T | |
| GTGCTGAAGA | 1616 | GTCCTCAAAA | 1617 |
| GGACAGTCA | | GAACTGTGA | |
| GCTGAAGAGG | 1618 | CCTCAAAAGA | 1619 |
| ACAGTCACA | | ACTGTGACT | |
| GAAGAGGACA | 1620 | CAAAAGAACT | 1621 |
| GTCACAGAAG | | GTGACTGAGG | |
| ACATA | | ATATT | |
| GAAGAGGACA | 1622 | CAAAAGAACT | 1623 |
| GTCACAGAAG | | GTGACTGAGG | |
| A | | A | |
| GAGGACAGTC | 1624 | AAGAACTGTG | 1625 |
| ACAGAAGACA | | ACTGAGGATA | |
| T | | T | |
| GGACAGTCAC | 1626 | GAACTGTGAC | 1627 |
| AGAAGACAT | | TGAGGATAT | |
| GACAGTCACA | 1628 | AACTGTGACT | 1629 |
| GAAGACATAG | | GAGGATATTG | |
| T | | T | |
| GACAGTCACA | 1630 | AACTGTGACT | 1631 |
| GAAGACATA | | GAGGATATT | |
| GCCTGGCTTC | 1632 | GCGTGGCTAC | 1633 |
| TGGTCATTGC | | TCGTGATAGC | |
| CCTGATAAT | | GCTCATTAT | |
| GGCTTCTGGT | 1634 | GGCTACTCGT | 1635 |
| CATTGCCCTG | | GATAGCGCTC | |
| ATAAT | | ATTAT | |
| GATTGGCTCA | 1636 | AATAGGGTCT | 1637 |
| GATCCTTTAA | | GACCCATTGA | |
| A | | A | |
| GCTATGGAGG | 1638 | GCAATGGAAG | 1639 |
| AAACCACGGA | | AGACGACCGA | |
| CTGGATCTA | | TTGGATTTA | |
| GGAGGAAACC | 1640 | GGAAGAGACG | 1641 |
| ACGGACTGGA | | ACCGATTGGA | |
| TCTAT | | TTTAC | |
| GGAAACCACG | 1642 | AGAGACGACC | 1643 |
| GACTGGATCT | | GATTGGATTT | |
| A | | A | |
| GAAACCACGG | 1644 | GAGACGACCG | 1645 |
| ACTGGATCTA | | ATTGGATTTA | |
| T | | C | |
| GGCAAGAAGC | 1646 | GGGAAAAAAC | 1647 |
| ACATGCAGTG | | ATATGCAATG | |
| A | | A | |

[0142] In some cases, the mammal can have CPVT, and the gene to be suppressed and replaced can be RYR2 (which encodes ryanodine receptor 2). An exemplary RYR2 sequence is set forth in NCBI RefSeq accession number NM_001035 (e.g., version NM_001035.3). A RYR2 polypeptide can, in some cases, have the amino acid sequence set forth in NCBI RefSeq accession number NP_001026 (e.g., version NP_001026.2).

[0143] Examples of shRNA sequences and corresponding shIMM sequences targeted to RYR2 are set forth in TABLE 1X.

TABLE 1X
Representative RYR2 shRNA and
shIMM sequences

| | SEQ | | SEQ |
|---|---|---|---|
| shRNA Sequence | ID | shIMM Sequence | ID |
| GAGAACATGGTGAAG | 1648 | GTGAGCACGGAGAGG | 1649 |
| AGCAGCGGAGAACT | | AACAACGCAGGACA | |
| GAACATGGTGAAGAG | 1650 | GAGCACGGAGAGGAA | 1651 |
| CAGCGGAGAACTGT | | CAACGCAGGACAGT | |
| GAGCATTTAGAGCAT | 1652 | GAACACTTGGAACAC | 1653 |
| GAAGACAAACAGAA | | GAGGATAAGCAAAA | |
| GCATTTAGAGCATGA | 1654 | ACACTTGGAACACGA | 1655 |
| AGACAAACAGAACA | | GGATAAGCAAAATA | |
| GTTGCAGTCCGTTCT | 1656 | GTAGCTGTGCGATCA | 1657 |
| AACCAGCATCTCAT | | AATCAACACCTGAT | |
| GTCCGTTCTAACCAG | 1658 | GTGCGATCAAATCAA | 1659 |
| CATCTCATCTGTGA | | CACCTGATTTGCGA | |
| GGGCGTCAGTGAAGG | 1660 | CGGGGTGAGCGAGGG | 1661 |
| TTCTGCTCAGTATA | | ATCAGCACAATACA | |
| GGCGTCAGTGAAGGT | 1662 | GGGGTGAGCGAGGGA | 1663 |
| TCTGCTCAGTATAA | | TCAGCACAATACAA | |
| GATGGCCTCTTCTTT | 1664 | GACGGGCTGTTTTTC | 1665 |
| CCAGTCGTTAGTTT | | CCTGTGGTAAGCTT | |
| GCCTCTTCTTTCCAG | 1666 | GGCTGTTTTTCCCTG | 1667 |
| TCGTTAGTTTCTCT | | TGGTAAGCTTTTCA | |
| GTCCGGTTAGAGATG | 1668 | GACCCGTAAGGGACG | 1669 |
| ACAACAAGAGACAA | | ATAATAAAAGGCAG | |
| GAAGAAATCCTCGCC | 1670 | GGAGGAACCCACGGC | 1671 |
| TTGTTCCCTACACT | | TAGTACCGTATACA | |
| GAAATCCTCGCCTTG | 1672 | GGAACCCACGGCTAG | 1673 |
| TTCCCTACACTCTT | | TACCGTATACACTA | |
| GCGGGATTATTCAAG | 1674 | GCCGGTTTGTTTAAA | 1675 |
| AGTGAGCACAAGAA | | AGCGAACATAAAAA | |
| GGATCCTCTGCAGTT | 1676 | AGACCCACTCCAATT | 1677 |
| CATGTCTCTTCATA | | TATGTCACTACACA | |
| GATCCTCTGCAGTTC | 1678 | GACCCACTCCAATTT | 1679 |
| ATGTCTCTTCATAT | | ATGTCACTACACAT | |
| GCCATGTGGATGAAC | 1680 | GTCACGTCGACGAGC | 1681 |
| CTCAGCTCCTCTAT | | CACAACTGCTGTAC | |
| GCTCCTCTATGCCAT | 1682 | ACTGCTGTACGCGAT | 1683 |
| TGAGAACAAGTACA | | AGAAAATAAATATA | |
| GCTGGCTACTATGAC | 1684 | GCAGGGTATTACGAT | 1685 |
| CTGCTGATTGACAT | | CTCCTCATAGATAT | |
| GAGGACTTGAAGCAC | 1686 | GAAGATTTAAAACAT | 1687 |
| ATCTTGCAGTTGAT | | ATTTTACAATTAAT | |
| GCAAGCCTTAAACAT | 1688 | GCAGGCGTTGAATAT | 1689 |
| GTCAGCTGCACTCA | | GTCTGCAGCTCTGA | |
| GATGCCTCTTAAACT | 1690 | AATGCCACTAAAGCT | 1691 |
| GCTGACAAATCATT | | CCTCACTAACCACT | |
| GCCCTATGATACACT | 1692 | CCCGTACGACACTCT | 1693 |
| GACAGCCAAAGAGA | | CACTGCGAAGGAAA | |
| GACCTGGAACTGGAC | 1694 | GATCTCGAGCTCGAT | 1695 |
| ACGCCTTCTATTGA | | ACCCCATCAATAGA | |
| GGTGGCAGCAGAGGC | 1696 | GGAGGGAGTAGGGGG | 1697 |
| AAAGGAGAACATTT | | AAGGGTGAGCACTT | |
| GGAGGACATGCTTCC | 1698 | GGTGGTCACGCATCG | 1699 |
| AACAAAGAGAAAGA | | AATAAGGAAAAGGA | |
| GAGGACATGCTTCCA | 1700 | GTGGTCACGCATCGA | 1701 |
| ACAAAGAGAAAGAA | | ATAAGGAAAAGGAG | |
| GGACATGCTTCCAAC | 1702 | GGTCACGCATCGAAT | 1703 |
| AAAGAGAAAGAAAT | | AAGGAAAAGGAGAT | |
| GGAGTTCTTGTCAGG | 1704 | GGTGTACTAGTGAGA | 1705 |
| CATAGGATTTCACT | | CACAGAATATCTCT | |
| GAGTTCTTGTCAGGC | 1706 | GTGTACTAGTGAGAC | 1707 |
| ATAGGATTTCACTA | | ACAGAATATCTCTT | |
| GGCCAGCATCAGTTC | 1708 | GGGCAACACCAATTT | 1709 |
| GGAGAAGACCTAAT | | GGTGAGGATCTTAT | |
| GCCAGCATCAGTTCG | 1710 | GGCAACACCAATTTG | 1711 |
| GAGAAGACCTAATA | | GTGAGGATCTTATT | |
| GTGGAGAGGCAACGT | 1712 | GTCGAAAGACAGCGA | 1713 |
| TCTGCATTAGGAGA | | TCAGCTTTGGGTGA | |
| GCTATTAGATGGCAA | 1714 | GCAATAAGGTGGCAG | 1715 |
| ATGGCTCTTTACAA | | ATGGCACTATATAA | |
| GCTGTCAATCTCTTT | 1716 | GCAGTGAACCTGTTC | 1717 |
| CTTCAGGGATATGA | | CTACAAGGTTACGA | |
| GGCCTATGCAGATAT | 1718 | GGCGTACGCTGACAT | 1719 |
| TATGGCAAAGAGTT | | AATGGCTAAAAGCT | |
| GCAGATATTATGGCA | 1720 | GCTGACATAATGGCT | 1721 |
| AAGAGTTGTCATGA | | AAAAGCTGCCACGA | |
| GGATGGTGACAGAGG | 1722 | GCATGGTCACTGAAG | 1723 |
| AAGGATCAGGAGAA | | AGGGTTCTGGTGAG | |
| GATGGTGACAGAGGA | 1724 | CATGGTCACTGAAGA | 1725 |
| AGGATCAGGAGAAA | | GGGTTCTGGTGAGA | |
| GAGAATGAAACCCTC | 1726 | GAAAACGAGACGCTG | 1727 |
| GACTACGAAGAGTT | | GATTATGAGGAATT | |
| GGATCTGAAGAGAGA | 1728 | CGACCTCAAAAGGGA | 1729 |
| AGGAGGACAGTACA | | GGGTGGTCAATATA | |
| GAAAGCCAAGGAAGA | 1730 | AAAGGCGAAAGAGGA | 1731 |
| CAAGGGCAAACAAA | | TAAAGGGAAGCAGA | |
| GCTACATGGAGCCCA | 1732 | GGTATATGGAACCGA | 1733 |
| CGTTGCGTATCTTA | | CCTTACGAATTTTG | |
| GATGATATTAAAGGC | 1734 | GACGACATAAAGGGG | 1735 |
| CAGTGGGATAGACT | | CAATGGGACAGGCT | |
| GAAGACCCAGCAGGA | 1736 | GAGGATCCTGCTGGT | 1737 |
| GATGAATATGAGAT | | GACGAGTACGAAAT | |

[0144] In some cases, the mammal can have FH, and the gene to be suppressed and replaced can be APOB (which encodes apolipoprotein B). An exemplary APOB sequence is set forth in NCBI RefSeq accession number NM_000384 (e.g., version NM_000384.3). An APOB polypeptide can, in some cases, have the amino acid sequence set forth in NCBI RefSeq accession number NP_000375 (e.g., version NP_000375.3).

[0145] Examples of shRNA sequences and corresponding shIMM sequences targeted to APOB are set forth in TABLE 1Y.

TABLE 1Y
Representative APOB shRNA and shIMM sequences

| | SEQ | | SEQ |
|---|---|---|---|
| shRNA Sequence | ID | shIMM Sequence | ID |
| GGGACTGCTGATTCA | 1738 | GGCACAGCAGACTCT | 1739 |
| AGAAGT | | AGGAGC | |
| GGGACTGCTGATTCA | 1740 | GGCACAGCAGACTCT | 1741 |
| AGAA | | AGGA | |
| GACTGCTGATTCAAG | 1742 | CACAGCAGACTCTAG | 1743 |
| AAGT | | GAGC | |
| GATTCAAGAAGTGCC | 1744 | GACTCTAGGAGCGCG | 1745 |
| ACCAGGATCA | | ACGAGAATTA | |
| GAAAGATGAACCTAC | 1746 | AAAGGACGAGCCAAC | 1747 |
| TTACAT | | ATATAT | |
| GAACCTACTTACATC | 1748 | GAGCCAACATATATT | 1749 |
| CTGAACATCA | | CTCAATATTA | |
| GGAAACTGCTCCACT | 1750 | GGTAATTGTTCGACA | 1751 |
| CACTTT | | CATTTC | |
| GGAAACTGCTCCACT | 1752 | GGTAATTGTTCGACA | 1753 |
| CACT | | CATT | |
| GAAACTGCTCCACTC | 1754 | GTAATTGTTCGACAC | 1755 |
| ACTT | | ATTT | |
| GAAGCCATCTGCAAG | 1756 | GAGGCGATTTGTAAA | 1757 |
| GAGCAACACCTCTT | | GAACAGCATCTGTT | |
| GCAAGGAGCAACACC | 1758 | GTAAAGAACAGCATC | 1759 |
| TCTT | | TGTT | |
| GAGCAACACCTCTTC | 1760 | GAACAGCATCTGTTT | 1761 |
| CTGCCTTTCTCCTA | | CTCCCATTTTCGTA | |
| GGGATGGTAGCACAA | 1762 | GGCATGGTTGCTCAG | 1763 |
| GTGACA | | GTCACT | |
| GGGATGGTAGCACAA | 1764 | GGCATGGTTGCTCAG | 1765 |
| GTGA | | GTCA | |
| GATGGTAGCACAAGT | 1766 | CATGGTTGCTCAGGT | 1767 |
| GACA | | CACT | |
| GAGCACCAAATCCAC | 1768 | AAGTACGAAGTCGAC | 1769 |
| ATCA | | TTCT | |
| GAGCTAATCTCTTCA | 1770 | GGGCAAACCTGTTTA | 1771 |
| ATAA | | ACAA | |
| GCCTCAGTGATGAAG | 1772 | GGCTGAGCGACGAGG | 1773 |
| CAGTCA | | CTGTGA | |
| GAAGCAGTCACATCT | 1774 | GAGGCTGTGACTTCA | 1775 |
| CTCT | | CTGT | |
| GAGCTGCTGGACATT | 1776 | GAACTCCTCGATATA | 1777 |
| GCTAAT | | GCAAAC | |
| GCTGCTGGACATTGC | 1778 | ACTCCTCGATATAGC | 1779 |
| TAATTA | | AAACTA | |
| GCTGCTGGACATTGC | 1780 | ACTCCTCGATATAGC | 1781 |
| TAAT | | AAAC | |
| GCTGGACATTGCTAA | 1782 | CCTCGATATAGCAAA | 1783 |
| TTACCT | | CTATCT | |
| GGACATTGCTAATTA | 1784 | CGATATAGCAAACTA | 1785 |
| CCTGATGGAACAGA | | TCTCATGGAGCAAA | |
| GCTAATTACCTGATG | 1786 | GCAAACTATCTCATG | 1787 |
| GAACAGATTCAAGA | | GAGCAAATACAGGA | |
| GATGGAACAGATTCA | 1788 | CATGGAGCAAATACA | 1789 |
| AGATGA | | GGACGA | |
| GATGGAACAGATTCA | 1790 | CATGGAGCAAATACA | 1791 |
| AGAT | | GGAC | |
| GAACAGATTCAAGAT | 1792 | GAGCAAATACAGGAC | 1793 |
| GACT | | GATT | |
| GGGATGAAGATTACA | 1794 | GCGACGAGGACTATA | 1795 |
| CCTATT | | CGTACT | |
| GGATGAAGATTACAC | 1796 | CGACGAGGACTATAC | 1797 |
| CTATTT | | GTACTT | |
| GGATGAAGATTACAC | 1798 | CGACGAGGACTATAC | 1799 |
| CTAT | | GTAC | |
| GATGAAGATTACACC | 1800 | GACGAGGACTATACG | 1801 |
| TATT | | TACT | |
| GGCCAAACCATGGAG | 1802 | GGGCAGACGATGGAA | 1803 |
| CAGTTA | | CAATTG | |
| GCCAAACCATGGAGC | 1804 | GGCAGACGATGGAAC | 1805 |
| AGTTAA | | AATTGA | |
| GTCCAAAGTACAAAG | 1806 | GTGCAGAGCACTAAA | 1807 |
| CCATCACTGA | | CCTTCTCTCA | |
| GAGCCTAAAGACAAG | 1808 | GAACCAAAGGATAAA | 1809 |
| GACCAGGAGGTTCT | | GATCAAGAAGTACT | |
| GGACCAGGAGGTTCT | 1810 | AGATCAAGAAGTACT | 1811 |
| TCTTCA | | ACTACA | |
| GGACCAGGAGGTTCT | 1812 | AGATCAAGAAGTACT | 1813 |
| TCTTCAGACT | | ACTACAAACA | |
| GGACCAGGAGGTTCT | 1814 | AGATCAAGAAGTACT | 1815 |
| TCTT | | ACTA | |
| GACCAGGAGGTTCTT | 1816 | GATCAAGAAGTACTA | 1817 |
| CTTCAGACTT | | CTACAAACAT | |
| GGAGGTTCTTCTTCA | 1818 | AGAAGTACTACTACA | 1819 |
| GACTTT | | AACATT | |
| GGAGGTTCTTCTTCA | 1820 | AGAAGTACTACTACA | 1821 |
| GACT | | AACA | |
| GAGGTTCTTCTTCAG | 1822 | GAAGTACTACTACAA | 1823 |
| ACTT | | ACAT | |
| GGCTGCCTATCTTAT | 1824 | CGCAGCGTACCTAAT | 1825 |
| GTTGAT | | GTTAAT | |
| GCTGCCTATCTTATG | 1826 | GCAGCGTACCTAATG | 1827 |
| TTGA | | TTAA | |
| GCCTATCTTATGTTG | 1828 | GCGTACCTAATGTTA | 1829 |
| ATGA | | ATGA | |
| GGAGTCCTTCACAGG | 1830 | GAAGCCCATCTCAAG | 1831 |
| CAGATATTAA | | CTGACATAAA | |
| GGAGTCCTTCACAGG | 1832 | GAAGCCCATCTCAAG | 1833 |
| CAGATATTAACAAA | | CTGACATAAATAAG | |
| GAGTCCTTCACAGGC | 1834 | AAGCCCATCTCAAGC | 1835 |
| AGATAT | | TGACAT | |
| GTCCTTCACAGGCAG | 1836 | GCCCATCTCAAGCTG | 1837 |
| ATATTA | | ACATAA | |
| GTCCTTCACAGGCAG | 1838 | GCCCATCTCAAGCTG | 1839 |
| ATAT | | ACAT | |
| GTCCAAATTCTACCA | 1840 | GTGCAGATACTTCCT | 1841 |
| TGGGAACAGA | | TGGGAGCAAA | |
| GGGAACAGAATGAGC | 1842 | GGGAGCAAAACGAAC | 1843 |
| AAGTGA | | AGGTCA | |
| GGGAACAGAATGAGC | 1844 | GGGAGCAAAACGAAC | 1845 |
| AAGTGAAGAA | | AGGTCAAAAA | |
| GGAACAGAATGAGCA | 1846 | GGAGCAAAACGAACA | 1847 |
| AGTGAA | | GGTCAA | |
| GAACAGAATGAGCAA | 1848 | GAGCAAAACGAACAG | 1849 |
| GTGAAGAACT | | GTCAAAAATT | |
| GAACAGAATGAGCAA | 1850 | GAGCAAAACGAACAG | 1851 |
| GTGA | | GTCA | |
| GTTGAGAAGCTGATT | 1852 | GTAGAAAAACTCATA | 1853 |
| AAAGAT | | AAGGAC | |
| GAGAAGCTGATTAAA | 1854 | GAAAAACTCATAAAG | 1855 |
| GATT | | GACT | |
| GGAGCTGGATTACAG | 1856 | GGTGCAGGTTTGCAA | 1857 |
| TTGCAAATAT | | TTACAGATTT | |
| GAGCTGGATTACAGT | 1858 | GTGCAGGTTTGCAAT | 1859 |
| TGCAAATATCTTCA | | TACAGATTTCATCT | |
| GCTGGATTACAGTTG | 1860 | GCAGGTTTGCAATTA | 1861 |
| CAAATATCTT | | CAGATTTCAT | |
| GGATTACAGTTGCAA | 1862 | GGTTTGCAATTACAG | 1863 |
| ATATCT | | ATTTCA | |
| GGATTACAGTTGCAA | 1864 | GGTTTGCAATTACAG | 1865 |
| ATAT | | ATTT | |
| GTTGCAAATATCTTC | 1866 | ATTACAGATTTCATC | 1867 |
| ATCT | | TTCA | |
| GCAAATATCTTCATC | 1868 | ACAGATTTCATCTTC | 1869 |
| TGGAGTCATT | | AGGTGTGATA | |
| GACAAATATGGGCAT | 1870 | CACTAACATGGGGAT | 1871 |
| CATCAT | | TATTAT | |
| GCATCATCATTCCGG | 1872 | GGATTATTATACCCG | 1873 |
| ACTTCGCTAGGAGT | | ATTTTGCAAGAAGC | |
| GGGAAGCTGAAGTTT | 1874 | GGCAAACTCAAATTC | 1875 |
| ATCATT | | ATTATA | |
| GAAGCTGAAGTTTAT | 1876 | CAAACTCAAATTCAT | 1877 |
| CATT | | TATA | |
| GAGGCCTACAGGAGA | 1878 | CAGACCAACTGGTGA | 1879 |
| GATT | | AATA | |
| GGTGGATACCCTGAA | 1880 | AGTCGACACGCTCAA | 1881 |
| GTTT | | ATTC | |
| GAAGCAGACTGAGGC | 1882 | CAAACAAACAGAAGC | 1883 |
| TACCAT | | AACGAT | |
| GTTGACCTCGGAACA | 1884 | GTAGATCTGGGTACT | 1885 |
| ATCCTCAGAGTTAA | | ATTCTGAGGGTAAA | |
| GACCTCGGAACAATC | 1886 | GATCTGGGTACTATT | 1887 |
| CTCAGAGTTA | | CTGAGGGTAA | |
| GACCTCGGAACAATC | 1888 | GATCTGGGTACTATT | 1889 |
| CTCAGAGTTAATGA | | CTGAGGGTAAACGA | |
| GGAACAATCCTCAGA | 1890 | GGTACTATTCTGAGG | 1891 |
| GTTA | | GTAA | |
| GAACAATCCTCAGAG | 1892 | GTACTATTCTGAGGG | 1893 |
| TTAA | | TAAA | |
| GGACATTCAGAACAA | 1894 | CGATATACAAAATAA | 1895 |
| GAAA | | AAAG | |
| GCAAGCAGAAGCCAG | 1896 | ACAGGCTGAGGCGAG | 1897 |
| AAGTGA | | GAGCGA | |
| GCAAGCAGAAGCCAG | 1898 | ACAGGCTGAGGCGAG | 1899 |
| AAGT | | GAGC | |
| GCAGAAGCCAGAAGT | 1900 | GCTGAGGCGAGGAGC | 1901 |
| GAGA | | GAAA | |
| GAACATGGGATTGCC | 1902 | AAATATGGGTTTACC | 1903 |
| AGACTT | | TGATTT | |
| GACCTCTCCACGAAT | 1904 | GATCTGTCGACCAAC | 1905 |
| GTCT | | GTGT | |
| GTGCAAGGATCTGGA | 1906 | GTCCAGGGTTCAGGT | 1907 |
| GAAACA | | GAGACT | |
| GTGCAAGGATCTGGA | 1908 | GTCCAGGGTTCAGGT | 1909 |
| GAAACAACAT | | GAGACTACTT | |
| GTGCAAGGATCTGGA | 1910 | GTCCAGGGTTCAGGT | 1911 |
| GAAACAACATATGA | | GAGACTACTTACGA | |
| GTGCAAGGATCTGGA | 1912 | GTCCAGGGTTCAGGT | 1913 |
| GAAA | | GAGA | |
| GCAAGGATCTGGAGA | 1914 | CCAGGGTTCAGGTGA | 1915 |
| AACAACATAT | | GACTACTTAC | |
| GCAAGGATCTGGAGA | 1916 | CCAGGGTTCAGGTGA | 1917 |
| AACA | | GACT | |
| GGATCTGGAGAAACA | 1918 | GGTTCAGGTGAGACT | 1919 |
| ACATAT | | ACTTAC | |
| GGATCTGGAGAAACA | 1920 | GGTTCAGGTGAGACT | 1921 |
| ACAT | | ACTT | |
| GATCTGGAGAAACAA | 1922 | GTTCAGGTGAGACTA | 1923 |
| CATA | | CTTA | |
| GGAGAAACAACATAT | 1924 | GGTGAGACTACTTAC | 1925 |
| GACCACAAGA | | GATCATAAAA | |
| GAAACAACATATGAC | 1926 | GAGACTACTTACGAT | 1927 |
| CACAAGAATA | | CATAAAAACA | |
| GGCACATATGGCCTG | 1928 | GGGACTTACGGGCTC | 1929 |
| TCTTGT | | TCATGC | |
| GGCACATATGGCCTG | 1930 | GGGACTTACGGGCTC | 1931 |
| TCTTGTCAGA | | TCATGCCAAA | |
| GGCACATATGGCCTG | 1932 | GGGACTTACGGGCTC | 1933 |
| TCTT | | TCAT | |
| GCCTGTCTTGTCAGA | 1934 | GGCTCTCATGCCAAA | 1935 |
| GGGATCCTAA | | GAGACCCAAA | |
| GAGAACTACGAGCTG | 1936 | GAAAATTATGAACTC | 1937 |
| ACTTTA | | ACATTG | |
| GAGAACTACGAGCTG | 1938 | GAAAATTATGAACTC | 1939 |
| ACTT | | ACAT | |
| GAACTACGAGCTGAC | 1940 | AAATTATGAACTCAC | 1941 |
| TTTA | | ATTG | |
| GACACCAATGGGAAG | 1942 | GATACGAACGGCAAA | 1943 |
| TATA | | TACA | |
| GATGGATATGACCTT | 1944 | AATGGACATGACGTT | 1945 |
| CTCTAA | | TTCAAA | |
| GATGGATATGACCTT | 1946 | AATGGACATGACGTT | 1947 |
| CTCT | | TTCA | |
| GCTTTCTGGATCACT | 1948 | CCTATCAGGTTCTCT | 1949 |
| AAAT | | TAAC | |
| GGATCACTAAATTCC | 1950 | GGTTCTCTTAACTCG | 1951 |
| CATGGTCTTGAGTT | | CACGGACTAGAATT | |
| GGTCTTGAGTTAAAT | 1952 | GGACTAGAATTGAAC | 1953 |
| GCTGACATCT | | GCAGATATTT | |
| GAGTTAAATGCTGAC | 1954 | GAATTGAACGCAGAT | 1955 |
| ATCTTA | | ATTTTG | |
| GAGTTAAATGCTGAC | 1956 | GAATTGAACGCAGAT | 1957 |
| ATCTTAGGCACTGA | | ATTTTGGGGACAGA | |
| GTTAAATGCTGACAT | 1958 | ATTGAACGCAGATAT | 1959 |
| CTTA | | TTTG | |
| GGGCATCTATGAAAT | 1960 | GCGCTTCAATGAAGT | 1961 |
| TAACAA | | TGACTA | |
| GGGCATCTATGAAAT | 1962 | GCGCTTCAATGAAGT | 1963 |
| TAACAACAAA | | TGACTACTAA | |
| GGCATCTATGAAATT | 1964 | CGCTTCAATGAAGTT | 1965 |
| AACA | | GACT | |
| GAAGGACTTAAGCTC | 1966 | GAGGGTCTAAAACTG | 1967 |
| TCAAAT | | TCTAAC | |
| GAAGGACTTAAGCTC | 1968 | GAGGGTCTAAAACTG | 1969 |
| TCAAATGACA | | TCTAACGATA | |
| GAAGGACTTAAGCTC | 1970 | GAGGGTCTAAAACTG | 1971 |
| TCAAATGACATGAT | | TCTAACGATATGAT | |
| GAAGGACTTAAGCTC | 1972 | GAGGGTCTAAAACTG | 1973 |
| TCAA | | TCTA | |
| GGACTTAAGCTCTCA | 1974 | GGTCTAAAACTGTCT | 1975 |
| AATGACATGA | | AACGATATGA | |
| GCAGGCTTATCACTG | 1976 | GCTGGGTTGTCTCTC | 1977 |
| GACTTCTCTT | | GATTTTTCAT | |
| GCAGGCTTATCACTG | 1978 | GCTGGGTTGTCTCTC | 1979 |
| GACTTCTCTTCAAA | | GATTTTTCATCTAA | |
| GGCTTATCACTGGAC | 1980 | GGGTTGTCTCTCGAT | 1981 |
| TTCTCT | | TTTTCA | |
| GGCTTATCACTGGAC | 1982 | GGGTTGTCTCTCGAT | 1983 |
| TTCTCTTCAA | | TTTTCATCTA | |
| GGCTTATCACTGGAC | 1984 | GGGTTGTCTCTCGAT | 1985 |
| TTCT | | TTTT | |
| GCTTATCACTGGACT | 1986 | GGTTGTCTCTCGATT | 1987 |
| TCTCTT | | TTTCAT | |
| GCTTATCACTGGACT | 1988 | GGTTGTCTCTCGATT | 1989 |
| TCTCTTCAAA | | TTTCATCTAA | |
| GCTACAGCCCTATTC | 1990 | ACTTCAACCGTACTC | 1991 |
| TCTGGTAACT | | ACTCGTTACA | |
| GCCCTATTCTCTGGT | 1992 | ACCGTACTCACTCGT | 1993 |
| AACT | | TACA | |
| GCTCTGGATCTCACC | 1994 | GCACTCGACCTGACG | 1995 |
| AACAAT | | AATAAC | |
| GGATCTCACCAACAA | 1996 | CGACCTGACGAATAA | 1997 |
| TGGGAAACTA | | CGGCAAGCTT | |
| GCCTTATCAGCAAGC | 1998 | GCGTTGTCTGCTAGT | 1999 |
| TATA | | TACA | |
| GCAAGCTATAAAGCA | 2000 | GCTAGTTACAAGGCT | 2001 |
| GACACT | | GATACA | |
| GCTATAAAGCAGACA | 2002 | GTTACAAGGCTGATA | 2003 |
| CTGT | | CAGT | |
| GCAGACACTGTTGCT | 2004 | GCTGATACAGTAGCA | 2005 |
| AAGGTT | | AAAGTA | |
| GCTTCAGCCATTGAC | 2006 | GCATCTGCGATAGAT | 2007 |
| ATGA | | ATGA | |
| GGGCAGCTGTATAGC | 2008 | GGCCAACTCTACAGT | 2009 |
| AAATTCCTGTTGAA | | AAGTTTCTCTTAAA | |
| GGCAGCTGTATAGCA | 2010 | GCCAACTCTACAGTA | 2011 |
| AATTCCTGTTGAAA | | AGTTTCTCTTAAAG | |
| GCTGTATAGCAAATT | 2012 | ACTCTACAGTAAGTT | 2013 |
| CCTGTTGAAA | | TCTCTTAAAG | |
| GAACCTCTGGCATTT | 2014 | GAGCCACTCGCTTTC | 2015 |
| ACTTTCTCTCATGA | | ACATTTTCACACGA | |
| GAACCTCTGGCATTT | 2016 | GAGCCACTCGCTTTC | 2017 |
| ACTT | | ACAT | |
| GGCATTTACTTTCTC | 2018 | CGCTTTCACATTTTC | 2019 |
| TCATGA | | ACACGA | |
| GGCATTTACTTTCTC | 2020 | CGCTTTCACATTTTC | 2021 |
| TCAT | | ACAC | |
| GCATTTACTTTCTCT | 2022 | GCTTTCACATTTTCA | 2023 |
| CATGAT | | CACGAC | |
| GCATTTACTTTCTCT | 2024 | GCTTTCACATTTTCA | 2025 |
| CATGATTACA | | CACGACTATA | |
| GCTCCACAAGTCATC | 2026 | GGTCGACTAGCCACC | 2027 |
| ATCT | | ACCT | |
| GGCACCTGGAAACTC | 2028 | GGGACGTGGAAGCTG | 2029 |
| AAGACCCAATTTAA | | AAAACGCAGTTCAA | |
| GGCACCTGGAAACTC | 2030 | GGGACGTGGAAGCTG | 2031 |
| AAGA | | AAAA | |
| GGAAACTCAAGACCC | 2032 | GGAAGCTGAAAACGC | 2033 |
| AATTTA | | AGTTCA | |
| GGAAACTCAAGACCC | 2034 | GGAAGCTGAAAACGC | 2035 |
| AATTTAACAA | | AGTTCAATAA | |
| GGAAACTCAAGACCC | 2036 | GGAAGCTGAAAACGC | 2037 |
| AATTTAACAACAAT | | AGTTCAATAATAAC | |
| GAAACTCAAGACCCA | 2038 | GAAGCTGAAAACGCA | 2039 |
| ATTTAA | | GTTCAA | |
| GACCCAATTTAACAA | 2040 | AACGCAGTTCAATAA | 2041 |
| CAATGA | | TAACGA | |
| GACCCAATTTAACAA | 2042 | AACGCAGTTCAATAA | 2043 |
| CAAT | | TAAC | |
| GGACGAACTCTGGCT | 2044 | GGTCGTACACTCGCA | 2045 |
| GACCTAACTCTACT | | GATCTTACACTTCT | |
| GACGAACTCTGGCTG | 2046 | GTCGTACACTCGCAG | 2047 |
| ACCTAA | | ATCTTA | |
| GACGAACTCTGGCTG | 2048 | GTCGTACACTCGCAG | 2049 |
| ACCTAACTCT | | ATCTTACACT | |
| GAACTCTGGCTGACC | 2050 | GTACACTCGCAGATC | 2051 |
| TAACTCTACT | | TTACACTTCT | |
| GATGCTTTAGAGATG | 2052 | GACGCATTGGAAATG | 2053 |
| AGAGAT | | AGGGAC | |
| GAAGCCCCAAGAATT | 2054 | AAAACCGCAGGAGTT | 2055 |
| TACAAT | | CACTAT | |
| GAAACCTGAAGCACA | 2056 | GGAATCTCAAACATA | 2057 |
| TCAATA | | TTAACA | |
| GAAACTGACTGCTCT | 2058 | AAAGCTCACAGCACT | 2059 |
| CACA | | GACT | |
| GGGAACTACAATTTC | 2060 | AGGTACAACTATATC | 2061 |
| ATTT | | TTTC | |
| GCCTTCAGAGCCAAA | 2062 | GCGTTTAGGGCGAAG | 2063 |
| GTCCATGAGT | | GTGCACGAAT | |
| GCCTTCAGAGCCAAA | 2064 | GCGTTTAGGGCGAAG | 2065 |
| GTCCATGAGT | | GTGCACGAAT | |
| GCCTTCAGAGCCAAA | 2066 | GCGTTTAGGGCGAAG | 2067 |
| GTCCATGAGTTAAT | | GTGCACGAATTGAT | |
| GAGCCAAAGTCCATG | 2068 | GGGCGAAGGTGCACG | 2069 |
| AGTTAA | | AATTGA | |
| GAGCCAAAGTCCATG | 2070 | GGGCGAAGGTGCACG | 2071 |
| AGTT | | AATT | |
| GCCAAAGTCCATGAG | 2072 | GCGAAGGTGCACGAA | 2073 |
| TTAATCGAGAGGTA | | TTGATTGAAAGATA | |
| GCCAAAGTCCATGAG | 2074 | GCGAAGGTGCACGAA | 2075 |
| TTAA | | TTGA | |
| GTCCATGAGTTAATC | 2076 | GTGCACGAATTGATT | 2077 |
| GAGAGGTATGAAGT | | GAAAGATACGAGGT | |
| GGCCCACCAATACAA | 2078 | AGCGCATCAGTATAA | 2079 |
| GTTGAA | | ATTAAA | |
| GGCCCACCAATACAA | 2080 | AGCGCATCAGTATAA | 2081 |
| GTTGAAGGAGACTA | | ATTAAAAGAAACAA | |
| GCCCACCAATACAAG | 2082 | GCGCATCAGTATAAA | 2083 |
| TTGAAGGAGACTAT | | TTAAAAGAAACAAT | |
| GCCCACCAATACAAG | 2084 | GCGCATCAGTATAAA | 2085 |
| TTGA | | TTAA | |
| GAAGCTAAGCAATGT | 2086 | AAAACTTAGTAACGT | 2087 |
| CCTACA | | GCTTCA | |
| GAAGCTAAGCAATGT | 2088 | AAAACTTAGTAACGT | 2089 |
| CCTA | | GCTT | |
| GCTAAGCAATGTCCT | 2090 | ACTTAGTAACGTGCT | 2091 |
| ACAA | | TCAG | |
| GATTTATTGATGATG | 2092 | GTTTCATAGACGACG | 2093 |
| CTGTCA | | CAGTGA | |
| GATGCTGTCAAGAAG | 2094 | GACGCAGTGAAAAAA | 2095 |
| CTTAAT | | CTAAAC | |
| GATGCTGTCAAGAAG | 2096 | GACGCAGTGAAAAAA | 2097 |
| CTTAATGAAT | | CTAAACGAGT | |
| GCTGTCAAGAAGCTT | 2098 | GCAGTGAAAAAACTA | 2099 |
| AATGAA | | AACGAG | |
| GGTGACTCAGAGACT | 2100 | AGTCACACAAAGGCT | 2101 |
| CAAT | | GAAC | |
| GAGGAAACCAAGGCC | 2102 | GAAGAGACGAAAGCG | 2103 |
| ACAGTT | | ACTGTA | |
| GAGGAAACCAAGGCC | 2104 | GAAGAGACGAAAGCG | 2105 |
| ACAGTTGCAGTGTA | | ACTGTAGCTGTCTA | |
| GGAAACCAAGGCCAC | 2106 | AGAGACGAAAGCGAC | 2107 |
| AGTT | | TGTA | |
| GAAACCAAGGCCACA | 2108 | GAGACGAAAGCGACT | 2109 |
| GTTGCAGTGT | | GTAGCTGTCT | |
| GAAACCAAGGCCACA | 2110 | GAGACGAAAGCGACT | 2111 |
| GTTGCAGTGTATCT | | GTAGCTGTCTACCT | |
| GGCCACAGTTGCAGT | 2112 | AGCGACTGTAGCTGT | 2113 |
| GTATCT | | CTACCT | |
| GGCCACAGTTGCAGT | 2114 | AGCGACTGTAGCTGT | 2115 |
| GTAT | | CTAC | |
| GGTTACAGGAGGCTT | 2116 | GGTTGCAAGAAGCAT | 2117 |
| TAAGTT | | TGAGCT | |
| GGCTTTAAGTTCAGC | 2118 | AGCATTGAGCTCTGC | 2119 |
| ATCTTT | | TTCATT | |
| GGACATTCAGCAGGA | 2120 | GGATATACAACAAGA | 2121 |
| ACTTCA | | GCTACA | |
| GGACATTCAGCAGGA | 2122 | GGATATACAACAAGA | 2123 |
| ACTT | | GCTA | |
| GGTTTATAGCACACT | 2124 | AGTATACAGTACTCT | 2125 |
| TGTCACCTACATTT | | AGTGACGTATATAT | |
| GTTTATAGCACACTT | 2126 | GTATACAGTACTCTA | 2127 |
| GTCACCTACA | | GTGACGTATA | |
| GCACACTTGTCACCT | 2128 | GTACTCTAGTGACGT | 2129 |
| ACATTT | | ATATAT | |
| GCACACTTGTCACCT | 2130 | GTACTCTAGTGACGT | 2131 |
| ACATTTCTGA | | ATATATCAGA | |
| GCACACTTGTCACCT | 2132 | GTACTCTAGTGACGT | 2133 |
| ACAT | | ATAT | |
| GGTAGAGCAAGGGTT | 2134 | AGTTGAACAGGGCTT | 2135 |
| CACTGT | | TACAGT | |
| GGTAGAGCAAGGGTT | 2136 | AGTTGAACAGGGCTT | 2137 |
| CACT | | TACA | |
| GTTCCTGAAATCAAG | 2138 | GTACCAGAGATTAAA | 2139 |
| ACCA | | ACGA | |
| GGCTCTTCAGAAAGC | 2140 | AGCACTACAAAAGGC | 2141 |
| TACCTT | | AACGTT | |
| GCTCTTCAGAAAGCT | 2142 | GCACTACAAAAGGCA | 2143 |
| ACCT | | ACGT | |
| GGATTCCATCAGTTC | 2144 | GAATACCTTCTGTAC | 2145 |
| AGATAA | | AAATTA | |
| GATTCCATCAGTTCA | 2146 | AATACCTTCTGTACA | 2147 |
| GATAAA | | AATTAA | |
| GATTCCATCAGTTCA | 2148 | AATACCTTCTGTACA | 2149 |
| GATA | | AATT | |
| GAATTTACCATCCTT | 2150 | GAGTTCACGATTCTA | 2151 |
| AACA | | AATA | |
| GAAAGTAAAGATCAT | 2152 | GAAGGTTAAAATTAT | 2153 |
| CAGA | | TAGG | |
| GGATCTGAAGGTGGA | 2154 | AGACCTCAAAGTCGA | 2155 |
| GGACAT | | AGATAT | |
| GAGAATCACCCTGCC | 2156 | CAGGATTACGCTCCC | 2157 |
| AGACTT | | TGATTT | |
| GAATCACCCTGCCAG | 2158 | GGATTACGCTCCCTG | 2159 |
| ACTT | | ATTT | |
| GCAAATGCACAACTC | 2160 | GCTAACGCTCAGCTG | 2161 |
| TCAAACCCTAAGAT | | TCTAATCCAAAAAT | |
| GCACAACTCTCAAAC | 2162 | GCTCAGCTGTCTAAT | 2163 |
| CCTAAGATTA | | CCAAAAATAA | |
| GAACGGAGCATGGGA | 2164 | GGACCGAACACGGCA | 2165 |
| GTGAAA | | GCGAGA | |
| GGAGTGATTGTCAAG | 2166 | GGTGTCATAGTGAAA | 2167 |
| ATAA | | ATTA | |
| GAGTGATTGTCAAGA | 2168 | GTGTCATAGTGAAAA | 2169 |
| TAAA | | TTAA | |
| GCTTACCCTGGATAG | 2170 | ACTAACGCTCGACAG | 2171 |
| CAACACTAAA | | TAATACAAAG | |
| GGATAGCAACACTAA | 2172 | CGACAGTAATACAAA | 2173 |
| ATACTT | | GTATTT | |
| GGATAGCAACACTAA | 2174 | CGACAGTAATACAAA | 2175 |
| ATACTTCCACAAAT | | GTATTTTCATAAGT | |
| GCAACACTAAATACT | 2176 | GTAATACAAAGTATT | 2177 |
| TCCACAAATT | | TTCATAAGTT | |
| GAACATCCCCAAACT | 2178 | AAATATTCCGAAGCT | 2179 |
| GGACTTCTCT | | CGATTTTTCA | |
| GACCTGCGCAACGAG | 2180 | GATCTCCGGAATGAA | 2181 |
| ATCAAGACACTGTT | | ATTAAAACTCTCTT | |
| GCGCAACGAGATCAA | 2182 | CCGGAATGAAATTAA | 2183 |
| GACACT | | AACTCT | |
| GCAACGAGATCAAGA | 2184 | GGAATGAAATTAAAA | 2185 |
| CACTGT | | CTCTCT | |
| GCAACGAGATCAAGA | 2186 | GGAATGAAATTAAAA | 2187 |
| CACT | | CTCT | |
| GTTGAAAGCTGGCCA | 2188 | CTTAAAGGCAGGGCA | 2189 |
| CATAGCATGGACTT | | TATTGCTTGGACAT | |
| GAAAGCTGGCCACAT | 2190 | AAAGGCAGGGCATAT | 2191 |
| AGCATGGACTTCTT | | TGCTTGGACATCAT | |
| GCTGGCCACATAGCA | 2192 | GCAGGGCATATTGCT | 2193 |
| TGGACTTCTT | | TGGACATCAT | |
| GGCCACATAGCATGG | 2194 | GGGCATATTGCTTGG | 2195 |
| ACTTCT | | ACATCA | |
| GGCCACATAGCATGG | 2196 | GGGCATATTGCTTGG | 2197 |
| ACTT | | ACAT | |
| GCCACATAGCATGGA | 2198 | GGCATATTGCTTGGA | 2199 |
| CTTCTT | | CATCAT | |
| GCCCCAGATTCTCAG | 2200 | GTCCGAGGTTTTCTG | 2201 |
| ATGA | | ACGA | |
| GATCAATAGCAAACA | 2202 | AATTAACAGTAAGCA | 2203 |
| CCTAAGAGTA | | TCTTAGGGTT | |
| GCTAAAGGCATGGCA | 2204 | GCAAAGGGGATGGCT | 2205 |
| CTGTTT | | CTCTTC | |
| GCTAAAGGCATGGCA | 2206 | GCAAAGGGGATGGCT | 2207 |
| CTGT | | CTCT | |
| GGAGAAGGGAAGGCA | 2208 | GGTGAGGGCAAAGCT | 2209 |
| GAGTTT | | GAATTC | |
| GAGAAGGGAAGGCAG | 2210 | GTGAGGGCAAAGCTG | 2211 |
| AGTTTA | | AATTCA | |
| GAGAAGGGAAGGCAG | 2212 | GTGAGGGCAAAGCTG | 2213 |
| AGTT | | AATT | |
| GAAGGGAAGGCAGAG | 2214 | GAGGGCAAAGCTGAA | 2215 |
| TTTA | | TTCA | |
| GGAAAGGTTATTGGA | 2216 | GGTAAAGTAATAGGT | 2217 |
| ACTT | | ACAT | |
| GCAAGTTGGCAAGTA | 2218 | GCTAGCTGGCAGGTT | 2219 |
| AGTGCTAGGT | | AGCGCAAGAT | |
| GCAAGTTGGCAAGTA | 2220 | GCTAGCTGGCAGGTT | 2221 |
| AGTGCTAGGTTCAA | | AGCGCAAGATTTAA | |
| GTTGGCAAGTAAGTG | 2222 | GCTGGCAGGTTAGCG | 2223 |
| CTAGGT | | CAAGAT | |
| GTTGGCAAGTAAGTG | 2224 | GCTGGCAGGTTAGCG | 2225 |
| CTAGGTTCAA | | CAAGATTTAA | |
| GGCAAGTAAGTGCTA | 2226 | GGCAGGTTAGCGCAA | 2227 |
| GGTTCA | | GATTTA | |
| GGCAAGTAAGTGCTA | 2228 | GGCAGGTTAGCGCAA | 2229 |
| GGTTCAATCA | | GATTTAACCA | |
| GGCAAGTAAGTGCTA | 2230 | GGCAGGTTAGCGCAA | 2231 |
| GGTTCAATCAGTAT | | GATTTAACCAATAC | |
| GGCAAGTAAGTGCTA | 2232 | GGCAGGTTAGCGCAA | 2233 |
| GGTT | | GATT | |
| GCAAGTAAGTGCTAG | 2234 | GCAGGTTAGCGCAAG | 2235 |
| GTTCAA | | ATTTAA | |
| GCAAGTAAGTGCTAG | 2236 | GCAGGTTAGCGCAAG | 2237 |
| GTTCAATCAGTATA | | ATTTAACCAATACA | |
| GTAAGTGCTAGGTTC | 2238 | GTTAGCGCAAGATTT | 2239 |
| AATCAGTATA | | AACCAATACA | |
| GTGCTAGGTTCAATC | 2240 | GCGCAAGATTTAACC | 2241 |
| AGTATA | | AATACA | |
| GTGCTAGGTTCAATC | 2242 | GCGCAAGATTTAACC | 2243 |
| AGTA | | AATA | |
| GCTAGGTTCAATCAG | 2244 | GCAAGATTTAACCAA | 2245 |
| TATA | | TACA | |
| GGAGGCCCATGTAGG | 2246 | GGAAGCGCACGTTGG | 2247 |
| AATAAA | | TATTAA | |
| GAGGCCCATGTAGGA | 2248 | GAAGCGCACGTTGGT | 2249 |
| ATAAAT | | ATTAAC | |
| GGCCCATGTAGGAAT | 2250 | AGCGCACGTTGGTAT | 2251 |
| AAAT | | TAAC | |
| GCTCCCCAGGACCTT | 2252 | ACTGCCGAGAACGTT | 2253 |
| TCAAAT | | CCAGAT | |
| GACCTTTCAAATTCC | 2254 | AACGTTCCAGATACC | 2255 |
| TGGATACACT | | AGGTTATACA | |
| GAGCTGCCAGTCCTT | 2256 | GAACTCCCTGTGCTA | 2257 |
| CATGTCCCTAGAAA | | CACGTGCCAAGGAA | |
| GCCAGTCCTTCATGT | 2258 | CCCTGTGCTACACGT | 2259 |
| CCCTAGAAAT | | GCCAAGGAAC | |
| GTCCTTCATGTCCCT | 2260 | GTGCTACACGTGCCA | 2261 |
| AGAAAT | | AGGAAC | |
| GTCCTTCATGTCCCT | 2262 | GTGCTACACGTGCCA | 2263 |
| AGAA | | AGGA | |
| GCTTTCTCTTCCAGA | 2264 | ACTATCACTACCTGA | 2265 |
| TTTCAA | | CTTTAA | |
| GCCATGGGCAATATT | 2266 | GCGATGGGGAACATA | 2267 |
| ACCTAT | | ACGTAC | |
| GCCATGGGCAATATT | 2268 | GCGATGGGGAACATA | 2269 |
| ACCTATGATT | | ACGTACGACT | |
| GGGCAATATTACCTA | 2270 | GGGGAACATAACGTA | 2271 |
| TGATTT | | CGACTT | |
| GGGCAATATTACCTA | 2272 | GGGGAACATAACGTA | 2273 |
| TGAT | | CGAC | |
| GGCAATATTACCTAT | 2274 | GGGAACATAACGTAC | 2275 |
| GATT | | GACT | |
| GTTGCTCATCTCCTT | 2276 | GTAGCACACCTGCTA | 2277 |
| TCTTCA | | TCATCT | |
| GTTGCTCATCTCCTT | 2278 | GTAGCACACCTGCTA | 2279 |
| TCTT | | TCAT | |
| GCTCATCTCCTTTCT | 2280 | GCACACCTGCTATCA | 2281 |
| TCATCT | | TCTTCA | |
| GCTCATCTCCTTTCT | 2282 | GCACACCTGCTATCA | 2283 |
| TCATCTTCAT | | TCTTCATCTT | |
| GCTCATCTCCTTTCT | 2284 | GCACACCTGCTATCA | 2285 |
| TCATCTTCATCTGT | | TCTTCATCTTCAGT | |
| GCTCATCTCCTTTCT | 2286 | GCACACCTGCTATCA | 2287 |
| TCAT | | TCTT | |
| GAGGGCACCACAAGA | 2288 | GAAGGGACGACTAGG | 2289 |
| TTGACAAGAA | | TTAACTAGGA | |
| GAGGGCACCACAAGA | 2290 | GAAGGGACGACTAGG | 2291 |
| TTGA | | TTAA | |
| GGCACCACAAGATTG | 2292 | GGGACGACTAGGTTA | 2293 |
| ACAAGA | | ACTAGG | |
| GGCACCACAAGATTG | 2294 | GGGACGACTAGGTTA | 2295 |
| ACAA | | ACTA | |
| GCACCACAAGATTGA | 2296 | GGACGACTAGGTTAA | 2297 |
| CAAGAA | | CTAGGA | |
| GTGGAGGGTAGTCAT | 2298 | GTCGAAGGAAGCCAC | 2299 |
| AACAGT | | AATAGC | |
| GGAGGGTAGTCATAA | 2300 | CGAAGGAAGCCACAA | 2301 |
| CAGT | | TAGC | |
| GAGGGTAGTCATAAC | 2302 | GAAGGAAGCCACAAT | 2303 |
| AGTA | | AGCA | |
| GTATGATTTCAATTC | 2304 | ATACGACTTTAACTC | 2305 |
| TTCAATGCTGTACT | | ATCTATGCTCTATT | |
| GATTTCAATTCTTCA | 2306 | GACTTTAACTCATCT | 2307 |
| ATGCTGTACT | | ATGCTCTATT | |
| GGAAAGCCTCACCTC | 2308 | AGAGAGTCTGACGTC | 2309 |
| TTACTT | | ATATTT | |
| GAAAGCCTCACCTCT | 2310 | GAGAGTCTGACGTCA | 2311 |
| TACT | | TATT | |
| GGAGATGTCAAGGGT | 2312 | GGTGACGTGAAAGGA | 2313 |
| TCGGTTCTTT | | TCCGTACTAT | |
| GAGGCCAACACTTAC | 2314 | GAAGCGAATACATAT | 2315 |
| TTGAAT | | TTAAAC | |
| GAGGCCAACACTTAC | 2316 | GAAGCGAATACATAT | 2317 |
| TTGA | | TTAA | |
| GGCCAACACTTACTT | 2318 | AGCGAATACATATTT | 2319 |
| GAAT | | AAAC | |
| GCCAACACTTACTTG | 2320 | GCGAATACATATTTA | 2321 |
| AATT | | AACT | |
| GCAAGTCAGCCCAGT | 2322 | GCTAGCCAACCGAGC | 2323 |
| TCCTTCCATGATTT | | TCGTTTCACGACTT | |
| GCCCAGTTCCTTCCA | 2324 | ACCGAGCTCGTTTCA | 2325 |
| TGATTT | | CGACTT | |
| GTTCCTTCCATGATT | 2326 | GCTCGTTTCACGACT | 2327 |
| TCCCTGACCT | | TTCCAGATCT | |
| GTGGCCCTGAATGCT | 2328 | GTCGCGCTCAACGCA | 2329 |
| AACACT | | AATACA | |
| GTGGCCCTGAATGCT | 2330 | GTCGCGCTCAACGCA | 2331 |
| AACA | | AATA | |
| GGCCCTGAATGCTAA | 2332 | CGCGCTCAACGCAAA | 2333 |
| CACTAA | | TACAAA | |
| GGCCCTGAATGCTAA | 2334 | CGCGCTCAACGCAAA | 2335 |
| CACT | | TACA | |
| GCCCTGAATGCTAAC | 2336 | GCGCTCAACGCAAAT | 2337 |
| ACTA | | ACAA | |
| GGTTCCATCGTGCAA | 2338 | AGTACCTTCCTGTAA | 2339 |
| ACTTGA | | GCTAGA | |
| GGTTCCATCGTGCAA | 2340 | AGTACCTTCCTGTAA | 2341 |
| ACTT | | GCTA | |
| GTTCCATCGTGCAAA | 2342 | GTACCTTCCTGTAAG | 2343 |
| CTTGACTTCA | | CTAGATTTTA | |
| GTTCCATCGTGCAAA | 2344 | GTACCTTCCTGTAAG | 2345 |
| CTTGACTTCAGAGA | | CTAGATTTTAGGGA | |
| GTGCAAACTTGACTT | 2346 | CTGTAAGCTAGATTT | 2347 |
| CAGAGA | | TAGGGA | |
| GTGCAAACTTGACTT | 2348 | CTGTAAGCTAGATTT | 2349 |
| CAGA | | TAGG | |
| GCAAACTTGACTTCA | 2350 | GTAAGCTAGATTITA | 2351 |
| GAGAAA | | GGGAGA | |
| GCAAACTTGACTTCA | 2352 | GTAAGCTAGATTITA | 2353 |
| GAGA | | GGGA | |
| GCTGAGAACTTCATC | 2354 | ACTCAGGACATCTTC | 2355 |
| ATTT | | TTTC | |
| GTACCTGCTGGAATT | 2356 | GTTCCAGCAGGTATA | 2357 |
| GTCA | | GTGA | |
| GTGACTTCAGTGCAG | 2358 | GAGATTTTAGCGCTG | 2359 |
| AATA | | AGTA | |
| GTGCAGAATATGAAG | 2360 | GCGCTGAGTACGAGG | 2361 |
| AAGA | | AGGA | |
| GATGGCAAATATGAA | 2362 | GACGGGAAGTACGAG | 2363 |
| GGACTT | | GGTCTA | |
| GCTTCTGGCTTGCTA | 2364 | GCATCAGGGTTACTT | 2365 |
| ACCTCTCTGA | | ACGTCACTCA | |
| GCTTCTGGCTTGCTA | 2366 | GCATCAGGGTTACTT | 2367 |
| ACCTCTCTGAAAGA | | ACGTCACTCAAGGA | |
| GCTTCTGGCTTGCTA | 2368 | GCATCAGGGTTACTT | 2369 |
| ACCT | | ACGT | |
| GGCTTGCTAACCTCT | 2370 | GGGTTACTTACGTCA | 2371 |
| CTGAAA | | CTCAAG | |
| GGCTTGCTAACCTCT | 2372 | GGGTTACTTACGTCA | 2373 |
| CTGAAAGACA | | CTCAAGGATA | |
| GGCTTGCTAACCTCT | 2374 | GGGTTACTTACGTCA | 2375 |
| CTGA | | CTCA | |
| GCTTGCTAACCTCTC | 2376 | GGTTACTTACGTCAC | 2377 |
| TGAAAGACAA | | TCAAGGATAA | |
| GCTTGCTAACCTCTC | 2378 | GGTTACTTACGTCAC | 2379 |
| TGAA | | TCAA | |
| GCTAACCTCTCTGAA | 2380 | ACTTACGTCACTCAA | 2381 |
| AGACAA | | GGATAA | |
| GGGCCATTAGGCAAA | 2382 | GCGCGATAAGACAGA | 2383 |
| TTGA | | TAGA | |
| GGCCATTAGGCAAAT | 2384 | CGCGATAAGACAGAT | 2385 |
| TGATGA | | AGACGA | |
| GGCCATTAGGCAAAT | 2386 | CGCGATAAGACAGAT | 2387 |
| TGAT | | AGAC | |
| GGACCTACCAAGAGT | 2388 | GCACGTATCAGGAAT | 2389 |
| GGAAGGACAA | | GGAAAGATAA | |

[0146] In some cases, the mammal can have DCM or HCM, and the gene to be suppressed and replaced can be TNNI3 (which encodes cardiac type Troponin 13). An exemplary TNNI3 sequence is set forth in NCBI RefSeq accession number NM_000363 (e.g., version NM_000363.5). A TNNI3 polypeptide can, in some cases, have the amino acid sequence set forth in NCBI RefSeq accession number Q59H18 (e.g., version Q59H18.3).

[0147] Examples of shRNA sequences and corresponding shIMM sequences targeted to TNNI3 are set forth in TABLE 1Z.

TABLE 1Z
Representative TNNI3 shRNA and
shIMM sequences

| shRNA | SEQ | shIMM | SEQ |
|---|---|---|---|
| Sequence | ID | Sequence | ID |
| GTGGACAAGG | 2390 | CTGGACTAGA | 2391 |
| TGGATGAAGA | | TGGATGAAAA | |
| GAGAT | | GGGAC | |
| GACAAGGTGG | 2392 | GACTAGATGG | 2393 |
| ATGAAGAGA | | ATGAAAAGG | |
| GACCTTCGAG | 2394 | GATCTACGTG | 2395 |
| GCAAGTTTA | | GGAAATTCA | |

[0148] In some cases, the mammal can have DCM or HCM, and the gene to be suppressed and replaced can be TNNC1 (which encodes slow skeletal and cardiac type Troponin C1). An exemplary TNNC1 sequence is set forth in NCBI RefSeq accession number NM_003280 (e.g., version NM_003280.3). A TNNC1 polypeptide can, in some cases, have the amino acid sequence set forth in NCBI RefSeq accession number NP_003271 (e.g., version NP_003271.1).

[0149] Examples of shRNA sequences and corresponding shIMM sequences targeted to TNNC1 are set forth in TABLE 1AA.

TABLE 1AA
Representative TNNC1 shRNA
and shIMM sequences

| shRNA | SEQ | shIMM | SEQ |
|---|---|---|---|
| Sequence | ID | Sequence | ID |
| GGTAGAGCAG | 2396 | CGTTGAACAA | 2397 |
| CTGACAGAA | | CTCACTGAG | |
| AGGAGCTGCA | 2398 | AAGAACTCCA | 2399 |
| GGAGATGAT | | AGAAATGAT | |
| GATGGTTCGG | 2400 | GATGGTACGC | 2401 |
| TGCATGAAG | | TGTATGAAA | |
| GCATGAAGGA | 2402 | GTATGAAAGA | 2403 |
| CGACAGCAAA | | TGATAGTAAG | |
| GGGAAATCT | | GGCAAGTCA | |
| ATGAAGGACG | 2404 | ATGAAAGATG | 2405 |
| ACAGCAAAGG | | ATAGTAAGGG | |
| GAAATCTGA | | CAAGTCAGA | |
| GAAGGACGAC | 2406 | GAAAGATGAT | 2407 |
| AGCAAAGGGA | | AGTAAGGGCA | |
| AATCT | | AGTCA | |
| AGGACGACAG | 2408 | AAGATGATAG | 2409 |
| CAAAGGGAAA | | TAAGGGCAAG | |
| TCTGA | | TCAGA | |
| GGACGACAGC | 2410 | AGATGATAGT | 2411 |
| AAAGGGAAAT | | AAGGGCAAGT | |
| CTGAG | | CAGAA | |
| GACGACAGCA | 2412 | GATGATAGTA | 2413 |
| AAGGGAAATC | | AGGGCAAGTC | |
| T | | A | |
| ACAGCAAAGG | 2414 | ATAGTAAGGG | 2415 |
| GAAATCTGA | | CAAGTCAGA | |
| GCAAAGGGAA | 2416 | GTAAGGGCAA | 2417 |
| ATCTGAGGAG | | GTCAGAAGAA | |
| GAGCTGTCT | | GAACTCTCA | |
| AAAGGGAAAT | 2418 | AAGGGCAAGT | 2419 |
| CTGAGGAGGA | | CAGAAGAAGA | |
| GCTGTCTGA | | ACTCTCAGA | |
| AGGGAAATCT | 2420 | GGGCAAGTCA | 2421 |
| GAGGAGGAGC | | GAAGAAGAAC | |
| TGTCT | | TCTCA | |
| GGAAATCTGA | 2422 | GCAAGTCAGA | 2423 |
| GGAGGAGCTG | | AGAAGAACTC | |
| TCTGA | | TCAGA | |
| GAAATCTGAG | 2424 | CAAGTCAGAA | 2425 |
| GAGGAGCTGT | | GAAGAACTCT | |
| CTGAC | | CAGAT | |
| AAATCTGAGG | 2426 | AAGTCAGAAG | 2427 |
| AGGAGCTGTC | | AAGAACTCTC | |
| T | | A | |
| ATCTGAGGAG | 2428 | GTCAGAAGAA | 2429 |
| GAGCTGTCT | | GAACTCTCA | |
| AGGAGCTGTC | 2430 | AAGAACTCTC | 2431 |
| TGACCTCTTC | | AGATCTGTTT | |
| CGCATGTTT | | CGGATGTTC | |
| AGGAGCTGTC | 2432 | AAGAACTCTC | 2433 |
| TGACCTCTT | | AGATCTGTT | |
| GCTGTCTGAC | 2434 | ACTCTCAGAT | 2435 |
| CTCTTCCGCA | | CTGTTTCGGA | |
| TGTTT | | TGTTC | |
| ATCGACCTGG | 2436 | ATTGATCTCG | 2437 |
| ATGAGCTGAA | | ACGAACTCAA | |
| GATAA | | AATTA | |
| GACCTGGATG | 2438 | GATCTCGACG | 2439 |
| AGCTGAAGAT | | AACTCAAAAT | |
| A | | T | |
| GACCTGGATG | 2440 | GATCTCGACG | 2441 |
| AGCTGAAGA | | AACTCAAAA | |
| ACCTGGATGA | 2442 | ATCTCGACGA | 2443 |
| GCTGAAGATA | | ACTCAAAATT | |
| A | | A | |
| ACCTGGATGA | 2444 | ATCTCGACGA | 2445 |
| GCTGAAGAT | | ACTCAAAAT | |
| GGATGAGCTG | 2446 | CGACGAACTC | 2447 |
| AAGATAATG | | AAAATTATG | |
| GAGCTGAAGA | 2448 | GAACTCAAAA | 2449 |
| TAATGCTGCA | | TTATGCTCCA | |
| GGCTACAGG | | AGCAACTGG | |
| AGGACGACAT | 2450 | AAGATGATAT | 2451 |
| CGAGGAGCTC | | TGAAGAACTG | |
| ATGAA | | ATGAA | |
| ACGACATCGA | 2452 | ATGATATTGA | 2453 |
| GGAGCTCATG | | AGAACTGATG | |
| A | | A | |
| ATCGAGGAGC | 2454 | ATTGAAGAAC | 2455 |
| TCATGAAGGA | | TGATGAAAGA | |
| CGGAGACAA | | TGGTGATAA | |
| GAGGAGCTCA | 2456 | GAAGAACTGA | 2457 |
| TGAAGGACGG | | TGAAAGATGG | |
| AGACAAGAA | | TGATAAAAA | |
| AGGAGCTCAT | 2458 | AAGAACTGAT | 2459 |
| GAAGGACGGA | | GAAAGATGGT | |
| GACAA | | GATAA | |
| GAGCTCATGA | 2460 | GAACTGATGA | 2461 |
| AGGACGGAGA | | AAGATGGTGA | |
| CAAGAACAA | | TAAAAATAA | |
| GAGCTCATGA | 2462 | GAACTGATGA | 2463 |
| AGGACGGAGA | | AAGATGGTGA | |
| CAAGA | | TAAAA | |
| AGCTCATGAA | 2464 | AACTGATGAA | 2465 |
| GGACGGAGAC | | AGATGGTGAT | |
| AAGAA | | AAAAA | |
| AGCTCATGAA | 2466 | AACTGATGAA | 2467 |
| GGACGGAGAC | | AGATGGTGAT | |
| A | | A | |
| GCTCATGAAG | 2468 | ACTGATGAAA | 2469 |
| GACGGAGACA | | GATGGTGATA | |
| AGAAC | | AAAAT | |
| GCTCATGAAG | 2470 | ACTGATGAAA | 2471 |
| GACGGAGACA | | GATGGTGATA | |
| A | | A | |
| GAAGGACGGA | 2472 | GAAAGATGGT | 2473 |
| GACAAGAACA | | GATAAAAATA | |
| A | | A | |
| GAAGGACGGA | 2474 | GAAAGATGGT | 2475 |
| GACAAGAAC | | GATAAAAAT | |
| AGGACGGAGA | 2476 | AAGATGGTGA | 2477 |
| CAAGAACAA | | TAAAAATAA | |
| GGACGGAGAC | 2478 | AGATGGTGAT | 2479 |
| AAGAACAAC | | AAAAATAAT | |

[0150] In some cases, the mammal can have HCM or DCM, and the gene to be suppressed and replaced can be MYL2 (which encodes myosin light chain 2). An exemplary MYL2 sequence is set forth in NCBI RefSeq accession number NM_000432 (e.g., version NM_000432.4). A MYL2 polypeptide can, in some cases, have the amino acid sequence set forth in NCBI RefSeq accession number NP_000423 (e.g., version NP_000423.2).

[0151] Examples of shRNA sequences and corresponding shIMM sequences targeted to MYL2 are set forth in TABLE 1BB.

TABLE 1BB
Representative MYL2 shRNA
and shIMM sequences

| shRNA | SEQ | shIMM | SEQ |
|---|---|---|---|
| Sequence | ID | Sequence | ID |
| GGCACCTAAG | 2480 | GGCTCCAAAA | 2481 |
| AAAGCAAAGA | | AAGGCTAAAA | |
| A | | A | |
| GGCACCTAAG | 2482 | GGCTCCAAAA | 2483 |
| AAAGCAAAGA | | AAGGCTAAAA | |
| AGAGA | | AAAGG | |
| GCCAACTCCA | 2484 | GCGAATTCGA | 2485 |
| ACGTGTTCT | | ATGTCTTTT | |
| GGAGGCCTTC | 2486 | AGAAGCGTTT | 2487 |
| ACTATCATGG | | ACAATTATGG | |
| ACCAGAACA | | ATCAAAATA | |
| GCCTTCACTA | 2488 | GCGTTTACAA | 2489 |
| TCATGGACCA | | TTATGGATCA | |
| GAACA | | AAATA | |
| GGACCAGAAC | 2490 | GGATCAAAAT | 2491 |
| AGGGATGGCT | | AGAGACGGGT | |
| TCATT | | TTATA | |
| GGACCAGAAC | 2492 | GGATCAAAAT | 2493 |
| AGGGATGGCT | | AGAGACGGGT | |
| TCATTGACA | | TTATAGATA | |
| GGGATGGCTT | 2494 | GAGACGGGTT | 2495 |
| CATTGACAAG | | TATAGATAAA | |
| A | | A | |
| GGATGGCTTC | 2496 | AGACGGGTTT | 2497 |
| ATTGACAAGA | | ATAGATAAAA | |
| A | | A | |
| GGATGGCTTC | 2498 | AGACGGGTTT | 2499 |
| ATTGACAAGA | | ATAGATAAAA | |
| ACGATCTGA | | ATGACCTCA | |
| GATGGCTTCA | 2500 | GACGGGTTTA | 2501 |
| TTGACAAGA | | TAGATAAAA | |
| GGCTTCATTG | 2502 | GGGTTTATAG | 2503 |
| ACAAGAACGA | | ATAAAAATGA | |
| TCTGA | | CCTCA | |
| GGCTTCATTG | 2504 | GGGTTTATAG | 2505 |
| ACAAGAACGA | | ATAAAAATGA | |
| TCTGAGAGA | | CCTCAGGGA | |
| GAACGATCTG | 2506 | AAATGACCTC | 2507 |
| AGAGACACCT | | AGGGATACGT | |
| T | | T | |
| GAGGCTCCGG | 2508 | GAAGCACCCG | 2509 |
| GTCCAATTAA | | GACCTATAAA | |
| CTTTACTGT | | TTTCACAGT | |
| GGCTCCGGGT | 2510 | AGCACCCGGA | 2511 |
| CCAATTAACT | | CCTATAAATT | |
| T | | T | |
| GGCTCCGGGT | 2512 | AGCACCCGGA | 2513 |
| CCAATTAACT | | CCTATAAATT | |
| TTACT | | TCACA | |
| GCTCCGGGTC | 2514 | GCACCCGGAC | 2515 |
| CAATTAACTT | | CTATAAATTT | |
| T | | C | |
| GGGTCCAATT | 2516 | CGGACCTATA | 2517 |
| AACTTTACT | | AATTTCACA | |
| GGGTCCAATT | 2518 | CGGACCTATA | 2519 |
| AACTTTACTG | | AATTTCACAG | |
| T | | T | |
| GTCCAATTAA | 2520 | GACCTATAAA | 2521 |
| CTTTACTGT | | TTTCACAGT | |
| GAGGAAACCA | 2522 | GAAGAGACGA | 2523 |
| TTCTCAACGC | | TACTGAATGC | |
| ATTCAAAGT | | TTTTAAGGT | |
| GGAAACCATT | 2524 | AGAGACGATA | 2525 |
| CTCAACGCAT | | CTGAATGCTI | |
| TCAAA | | TTAAG | |
| GAAACCATTC | 2526 | GAGACGATAC | 2527 |
| TCAACGCATT | | TGAATGCTTT | |
| CAAAGTGTT | | TAAGGTCTT | |
| GGGTGCTGAA | 2528 | GCGTCCTCAA | 2529 |
| GGCTGATTA | | AGCAGACTA | |
| GGTGCTGAAG | 2530 | CGTCCTCAAA | 2531 |
| GCTGATTACG | | GCAGACTATG | |
| T | | T | |
| GGCTGATTAC | 2532 | AGCAGACTAT | 2533 |
| GTTCGGGAAA | | GTACGCGAGA | |
| TGCTGACCA | | TGCTCACGA | |
| GTTCGGGAAA | 2534 | GTACGCGAGA | 2535 |
| TGCTGACCA | | TGCTCACGA | |
| GGAGGAGGTT | 2536 | AGAAGAAGTA | 2537 |
| GACCAGATGT | | GATCAAATGT | |
| T | | T | |
| GAGGAGGTTG | 2538 | GAAGAAGTAG | 2539 |
| ACCAGATGT | | ATCAAATGT | |
| GACGTGACTG | 2540 | GATGTCACAG | 2541 |
| GCAACTTGGA | | GGAATTTAGA | |
| CTACA | | TTATA | |
| GACTGGCAAC | 2542 | CACAGGGAAT | 2543 |
| TTGGACTACA | | TTAGATTATA | |
| A | | A | |
| GGACTACAAG | 2544 | AGATTATAAA | 2545 |
| AACCTGGTGC | | AATCTCGTCC | |
| ACATCATCA | | ATATTATTA | |
| GTGCACATCA | 2546 | GTCCATATTA | 2547 |
| TCACCCACGG | | TTACGCATGG | |
| AGAAGAGAA | | TGAGGAAAA | |

[0152] In some cases, the mammal can have HCM or DCM, and the gene to be suppressed and replaced can be MYL3 (which encodes myosin light chain 3). An exemplary MYL3 sequence is set forth in NCBI RefSeq accession number NM_000258 (e.g., version NM_000258.3). An MYL3 polypeptide can, in some cases, have the amino acid sequence set forth in NCBI RefSeq accession number NP_000249 (e.g., version NP_000249.1).

[0153] Examples of shRNA sequences and corresponding shIMM sequences targeted to MYL3 are set forth in TABLE 1CC.

TABLE 1CC
Representative MYL3 shRNA
and shIMM sequences

| shRNA | SEQ | shIMM | SEQ |
|---|---|---|---|
| Sequence | ID | Sequence | ID |
| GATGCTTCCA | 2548 | GACGCATCGA | 2549 |
| AGATCAAGA | | AAATTAAAA | |
| GATGAAGATC | 2550 | AATGAAAATT | 2551 |
| ACCTACGGGC | | ACGTATGGCC | |
| AGTGT | | AATGC | |
| GAAGCCAAGA | 2552 | CAAACCTAGG | 2553 |
| CAGGAAGAGC | | CAAGAGGAAC | |
| T | | T | |
| GAAGCCAAGA | 2554 | CAAACCTAGG | 2555 |
| CAGGAAGAGC | | CAAGAGGAAC | |
| TCAATACCA | | TGAACACGA | |
| GAAGAGCTCA | 2556 | GAGGAACTGA | 2557 |
| ATACCAAGAT | | ACACGAAAAT | |
| GATGGACTT | | GATGGATTT | |
| GAGCTCAATA | 2558 | GAACTGAACA | 2559 |
| CCAAGATGA | | CGAAAATGA | |
| GCTCAATACC | 2560 | ACTGAACACG | 2561 |
| AAGATGATGG | | AAAATGATGG | |
| ACTTT | | ATTTC | |
| GAGGCTGACA | 2562 | AAGACTCACT | 2563 |
| GAAGACGAAG | | GAGGATGAGG | |
| TGGAGAAGT | | TCGAAAAAT | |
| GCTGACAGAA | 2564 | ACTCACTGAG | 2565 |
| GACGAAGTGG | | GATGAGGTCG | |
| A | | A | |
| GCTGACAGAA | 2566 | ACTCACTGAG | 2567 |
| GACGAAGTGG | | GATGAGGTCG | |
| AGAAGTTGA | | AAAAATTAA | |
| GAAGACGAAG | 2568 | GAGGATGAGG | 2569 |
| TGGAGAAGT | | TCGAAAAAT | |
| GACGAAGTGG | 2570 | GATGAGGTCG | 2571 |
| AGAAGTTGA | | AAAAATTAA | |
| GCAAGAGGAC | 2572 | CCAGGAAGAT | 2573 |
| TCCAATGGCT | | TCGAACGGGT | |
| GCATCAACT | | GTATTAATT | |
| GAGGACTCCA | 2574 | GAAGATTCGA | 2575 |
| ATGGCTGCAT | | ACGGGTGTAT | |
| CAACT | | TAATT | |

[0154] In some cases, the mammal can have HCM or DCM, and the gene to be suppressed and replaced can be JPH2 (which encodes junctophilin 2). Exemplary JPH2 sequences are set forth in NCBI RefSeq accession number NM_020433 (e.g., version NM_020433.5) and NCBI RefSeq accession number NM_175913 (e.g., version NM_175913.4). A JPH2 polypeptide can, in some cases, have the amino acid sequence set forth in NCBI RefSeq accession number NP_065166 (e.g., version NP_065166.2) or NCBI RefSeq accession number NP_787109 (e.g., version NP_787109.2).

[0155] Examples of shRNA sequences and corresponding shIMM sequences targeted to JPH2 are set forth in TABLE 1DD.

TABLE 1DD
Representative JPH2 shRNA
and shIMM sequences

| shRNA | SEQ | shIMM | SEQ |
|---|---|---|---|
| Sequence | ID | Sequence | ID |
| GCGAATACTC | 2576 | GGGAGTATTC | 2577 |
| TGGCTCCTGG | | AGGGTCGTGG | |
| AACTT | | AATTT | |
| GCCGTGTCAG | 2578 | GTCGAGTGAG | 2579 |
| CTTCCTTAAG | | TTTTCTAAAA | |
| A | | A | |
| GCCAACCAGG | 2580 | GCGAATCAAG | 2581 |
| AGTCCAACAT | | AATCGAATAT | |
| T | | A | |
| GTCCAACATT | 2582 | ATCGAATATA | 2583 |
| GCTCGCACTT | | GCACGGACAT | |
| T | | T | |
| GACTTCTACC | 2584 | GATTTTTATC | 2585 |
| AGCCAGGTCC | | AACCTGGACC | |
| GGAATATCA | | CGAGTACCA | |
| GCATGGTGAT | 2586 | GTATGGTCAT | 2587 |
| CCTGCTGAAC | | TCTCCTCAAT | |
| A | | A | |

[0156] In some cases, the mammal can have LQTS, HCM, or limb-girdle muscular dystrophy (LGMD), and the gene to be suppressed and replaced can be CAV3 (which encodes caveolin 3). Exemplary CAV3 sequences are set forth in NCBI RefSeq accession number NM_033337 (e.g., version NM_033337.3) and NCBI RefSeq accession number NM_001234 (e.g., version NM_001234.5). A CAV3 polypeptide can, in some cases, have the amino acid sequence set forth in NCBI RefSeq accession number NP_203123 (e.g., version NP_203123.1) or NCBI RefSeq accession number NP_001225 (e.g., version NP_001225.1).

[0157] Examples of shRNA sequences and corresponding shIMM sequences targeted to CAV3 are set forth in TABLE 1EE.

TABLE 1EE
Representative CAV3 shRNA
and shIMM sequences

| shRNA | SEQ | shIMM | SEQ |
|---|---|---|---|
| Sequence | ID | Sequence | ID |
| GGCCCAGATC | 2588 | AGCGCAAATT | 2589 |
| GTCAAGGATA | | GTGAAAGACA | |
| T | | T | |
| GGTGAACCGA | 2590 | CGTCAATCGT | 2591 |
| GACCCCAAGA | | GATCCGAAAA | |
| ACATT | | ATATA | |
| GTGAACCGAG | 2592 | GTCAATCGTG | 2593 |
| ACCCCAAGAA | | ATCCGAAAAA | |
| CATTA | | TATAA | |
| GAACCGAGAC | 2594 | CAATCGTGAT | 2595 |
| CCCAAGAACA | | CCGAAAAATA | |
| T | | T | |
| GAGACCCCAA | 2596 | GTGATCCGAA | 2597 |
| GAACATTAAC | | AAATATAAAT | |
| GAGGACATA | | GAAGATATT | |
| GACCCCAAGA | 2598 | GATCCGAAAA | 2599 |
| ACATTAACGA | | ATATAAATGA | |
| GGACA | | AGATA | |
| GACCCCAAGA | 2600 | GATCCGAAAA | 2601 |
| ACATTAACGA | | ATATAAATGA | |
| GGACATAGT | | AGATATTGT | |
| GAACATTAAC | 2602 | AAATATAAAT | 2603 |
| GAGGACATA | | GAAGATATT | |
| GAACATTAAC | 2604 | AAATATAAAT | 2605 |
| GAGGACATAG | | GAAGATATTG | |
| T | | T | |
| GAGCTACACC | 2606 | CAGTTATACG | 2607 |
| ACCTTCACT | | ACGTTTACA | |
| GAGCTACACC | 2608 | CAGTTATACG | 2609 |
| ACCTTCACTG | | ACGTTTACAG | |
| T | | T | |
| GCTACACCAC | 2610 | GTTATACGAC | 2611 |
| CTTCACTGT | | GTTTACAGT | |
| GCTACACCAC | 2612 | GTTATACGAC | 2613 |
| CTTCACTGTC | | GTTTACAGTG | |
| T | | T | |
| GCATCTCCTT | 2614 | GTATTTCGTT | 2615 |
| CTGCCACATC | | TTGTCATATT | |
| T | | T | |
| GCCATGCATT | 2616 | CCCTTGTATA | 2617 |
| AAGAGCTACC | | AAAAGTTATC | |
| T | | T | |

[0158] In some cases, the mammal can have LQTS or CPVT, and the gene to be suppressed and replaced can be TECRL (which encodes trans-2,3-enoyl-CoA reductase like protein). Exemplary TECRL sequences are set forth in NCBI RefSeq accession number NM_001010874 (e.g., version NM_001010874.5) and NCBI RefSeq accession number NM_001363796 (e.g., version NM_001363796.1). A TECRL polypeptide can, in some cases, have the amino acid sequence set forth in NCBI RefSeq accession number NP_001010874 (e.g., version NP_001010874.2) or NCBI RefSeq accession number NP_001350725 (e.g., version NP_001350725.1).

[0159] Examples of shRNA sequences and corresponding shIMM sequences targeted to TECRL are set forth in TABLE 1FF.

TABLE 1FF
Representative TECRL shRNA
and shIMM sequences

| shRNA | SEQ | shIMM | SEQ |
|---|---|---|---|
| Sequence | ID | Sequence | ID |
| GGAACGCAAG | 2618 | CGAGCGGAAA | 2619 |
| AGAGCATTAC | | AGGGCTTTGC | |
| T | | T | |
| GAACGCAAGA | 2620 | GAGCGGAAAA | 2621 |
| GAGCATTACT | | GGGCTTTGCT | |
| T | | A | |
| GAGCTACACG | 2622 | GGGCAACTCG | 2623 |
| GTTCATACT | | CTTTATTCT | |
| GAGCTACACG | 2624 | GGGCAACTCG | 2625 |
| GTTCATACTG | | CTTTATTCTC | |
| A | | A | |
| GCTACACGGT | 2626 | GCAACTCGCT | 2627 |
| TCATACTGA | | TTATTCTCA | |
| GAAGGATGAT | 2628 | CAAAGACGAC | 2629 |
| ATGAGAAAT | | ATGAGGAAC | |
| GCCCTCTAAG | 2630 | GGCCACTTAG | 2631 |
| ACCAACTCCA | | GCCTACACCT | |
| GCAGTCAAA | | GCTGTGAAG | |
| GACCAACTCC | 2632 | GGCCTACACC | 2633 |
| AGCAGTCAA | | TGCTGTGAA | |
| GATGCTCAAA | 2634 | GACGCACAGA | 2635 |
| CAAGGAAACA | | CTAGAAAGCA | |
| GATAT | | AATTT | |
| GCTCAAACAA | 2636 | GCACAGACTA | 2637 |
| GGAAACAGA | | GAAAGCAAA | |
| GCTCAAACAA | 2638 | GCACAGACTA | 2639 |
| GGAAACAGAT | | GAAAGCAAAT | |
| A | | T | |
| GCTCAAACAA | 2640 | GCACAGACTA | 2641 |
| GGAAACAGAT | | GAAAGCAAAT | |
| ATGTATTCT | | TTGCATACT | |
| GGAAACAGAT | 2642 | GAAAGCAAAT | 2643 |
| ATGTATTCT | | TTGCATACT | |
| GAAGGACTAC | 2644 | AAAAGATTAT | 2645 |
| ATTACCATTC | | ATAACGATAC | |
| AAAGT | | AGAGC | |
| GGACTACATT | 2646 | AGATTATATA | 2647 |
| ACCATTCAA | | ACGATACAG | |
| GGACTACATT | 2648 | AGATTATATA | 2649 |
| ACCATTCAAA | | ACGATACAGA | |
| GTATT | | GCATA | |
| GCAGCTTCCT | 2650 | GCTGCATCGT | 2651 |
| CCATTGTCA | | CGATAGTGA | |
| GCAGCTTCCT | 2652 | GCTGCATCGT | 2653 |
| CCATTGTCAC | | CGATAGTGAC | |
| A | | T | |
| GCAGCTTCCT | 2654 | GCTGCATCGT | 2655 |
| CCATTGTCAC | | CGATAGTGAC | |
| ACTGT | | TCTCT | |
| GTCAGTTGGA | 2656 | GTGAGCTGGA | 2657 |
| CCACAGTGT | | CGACTGTCT | |
| GGACCTCTGC | 2658 | GGTCCACTCC | 2659 |
| TAATATACCT | | TTATTTATCT | |
| CCTCT | | GCTGT | |
| GACCTCTGCT | 2660 | GTCCACTCCT | 2661 |
| AATATACCT | | TATTTATCT | |
| GACCTCTGCT | 2662 | GTCCACTCCT | 2663 |
| AATATACCTC | | TATTTATCTG | |
| CTCTT | | CTGTT | |
| GCTAATATAC | 2664 | CCTTATTTAT | 2665 |
| CTCCTCTTT | | CTGCTGTTC | |
| GAGGATCCCA | 2666 | AAGAATTCCT | 2667 |
| TGTATATAT | | TGCATTTAC | |
| GGCTTGCTTC | 2668 | AGCATGTTTT | 2669 |
| TGTCATTGT | | TGCCACTGC | |
| GGCTTGCTTC | 2670 | AGCATGTTTT | 2671 |
| TGTCATTGTA | | TGCCACTGCA | |
| T | | T | |
| GCTTGCTTCT | 2672 | GCATGTTTTT | 2673 |
| GTCATTGTA | | GCCACTGCA | |
| GCTTGCTTCT | 2674 | GCATGTTTTT | 2675 |
| GTCATTGTAT | | GCCACTGCAT | |
| A | | T | |
| GGGATTTACT | 2676 | GGGTTTCACA | 2677 |
| TCTTGGATTG | | TCATGGATAG | |
| CCTACTACA | | CGTATTATA | |
| GGATTTACTT | 2678 | GGTTTCACAT | 2679 |
| CTTGGATTGC | | CATGGATAGC | |
| CTACTACAT | | GTATTATAT | |
| GATTTACTTC | 2680 | GTTTCACATC | 2681 |
| TTGGATTGCC | | ATGGATAGCG | |
| TACTA | | TATTA | |
| GATTTACTTC | 2682 | GTTTCACATC | 2683 |
| TTGGATTGCC | | ATGGATAGCG | |
| TACTACATT | | TATTATATA | |
| GATTGCCTAC | 2684 | GATAGCGTAT | 2685 |
| TACATTAAT | | TATATAAAC | |
| GCCTACTACA | 2686 | GCGTATTATA | 2687 |
| TTAATCATCC | | TAAACCACCC | |
| ACTAT | | TCTTT | |
| GAAACAGGCA | 2688 | GTAATAGACA | 2689 |
| AATCACAGT | | GATTACTGT | |
| GGCAAATCAC | 2690 | GACAGATTAC | 2691 |
| AGTATCTGCT | | TGTTTCAGCA | |
| ATCAA | | ATTAA | |
| GCAAATCACA | 2692 | ACAGATTACT | 2693 |
| GTATCTGCTA | | GTTTCAGCAA | |
| TCAAT | | TTAAC | |
| GCTGGGAATC | 2694 | GCAGGCAACC | 2695 |
| ATTTCATCA | | ACTTTATTA | |
| GCTGGGAATC | 2696 | GCAGGCAACC | 2697 |
| ATTTCATCAA | | ACTTTATTAA | |
| T | | C | |
| GCCTGTTTCC | 2698 | GCGTGCTTTC | 2699 |
| CAAGTCCAAA | | CTAGCCCTAA | |
| TTATA | | CTACA | |
| GTTTCCCAAG | 2700 | GCTTTCCTAG | 2701 |
| TCCAAATTA | | CCCTAACTA | |
| GTTTCCCAAG | 2702 | GCTTTCCTAG | 2703 |
| TCCAAATTAT | | CCCTAACTAC | |
| A | | A | |
| GGTTTCATGT | 2704 | CGTATCTTGC | 2705 |
| CCTAACTACA | | CCAAATTATA | |
| CCTAT | | CGTAC | |
| GTTTCATGTC | 2706 | GTATCTTGCC | 2707 |
| CTAACTACA | | CAAATTATA | |
| GTCCTAACTA | 2708 | GCCCAAATTA | 2709 |
| CACCTATGA | | TACGTACGA | |
| GTCCTAACTA | 2710 | GCCCAAATTA | 2711 |
| CACCTATGAG | | TACGTACGAA | |
| A | | A | |
| GAGATTGGAT | 2712 | GAAATAGGTT | 2713 |
| CATGGATTAG | | CTTGGATAAG | |
| T | | C | |
| GAGATTGGAT | 2714 | GAAATAGGTT | 2715 |
| CATGGATTAG | | CTTGGATAAG | |
| TTTCACAGT | | CTTTACTGT | |
| GATTGGATCA | 2716 | AATAGGTTCT | 2717 |
| TGGATTAGT | | TGGATAAGC | |
| GATTGGATCA | 2718 | AATAGGTTCT | 2719 |
| TGGATTAGTT | | TGGATAAGCT | |
| T | | T | |
| GATTGGATCA | 2720 | AATAGGTTCT | 2721 |
| TGGATTAGTT | | TGGATAAGCT | |
| TCACA | | TTACT | |
| GATTGGATCA | 2722 | AATAGGTTCT | 2723 |
| TGGATTAGTT | | TGGATAAGCT | |
| TCACAGTCA | | TTACTGTGA | |
| GGATCATGGA | 2724 | GGTTCTTGGA | 2725 |
| TTAGTTTCA | | TAAGCTTTA | |
| GGATCATGGA | 2726 | GGTTCTTGGA | 2727 |
| TTAGTTTCAC | | TAAGCTTTAC | |
| A | | T | |
| GGATCATGGA | 2728 | GGTTCTTGGA | 2729 |
| TTAGTTTCAC | | TAAGCTTTAC | |
| AGTCA | | TGTGA | |
| GATCATGGAT | 2730 | GTTCTTGGAT | 2731 |
| TAGTTTCACA | | AAGCTTTACT | |
| GTCAT | | GTGAT | |
| GGATTAGTTT | 2732 | GGATAAGCTT | 2733 |
| CACAGTCAT | | TACTGTGAT | |
| GGATTAGTTT | 2734 | GGATAAGCTT | 2735 |
| CACAGTCATG | | TACTGTGATG | |
| A | | A | |
| GATGAGTATC | 2736 | CATGAGCATT | 2737 |
| CAGATGTCT | | CAAATGTCA | |

[0160] Any appropriate method can be used to deliver a SupRep nucleic acid construct to cells (e.g., cardiac cells) within a living mammal. For example, a SupRep construct containing a suppressive component and a replacement component can be administered to a mammal using one or more vectors, such as viral vectors. In some cases, vectors for administering SupRep nucleic acids can be used for transient expression of the suppressive and corrective components. In some cases, vectors for administering SupRep nucleic acids can be used for stable expression of the suppressive and corrective components. In some cases, where a vector for administering nucleic acid can be used for stable expression, the vector can be engineered to integrate nucleic acid designed to express the suppressive component and/or nucleic acid designed to express the corrective component into the genome of a cell. In such cases, any appropriate method can be used to integrate the nucleic acid(s) into the genome of a cell. For example, gene therapy techniques can be used to integrate nucleic acid designed to express a suppressive component (e.g., a shRNA) and/or nucleic acid designed to express a corrective component (e.g., a wild type polypeptide that is immune to the suppressive component) into the genome of a cell. In some cases, stable expression does not necessarily require integration into the genome. Using AAV9, for example, the SupRep DNA can persist on its own in the cell, without integrating into the human genome. Non-integrated DNA typically is destroyed as genomic DNA replicates, but in non-dividing cells such as cardiomyocytes or neurons, the SupRep DNA can persist indefinitely since the cells do not replicate or divide to remove the SupRep DNA.

[0161] Vectors for administering SupRep nucleic acids to cells can be prepared using standard materials (e.g., packaging cell lines, helper viruses, and vector constructs). See, for example, Gene Therapy Protocols (Methods in Molecular Medicine), edited by Jeffrey R. Morgan, Humana Press, Totowa, NJ (2002), and Viral Vectors for Gene Therapy: Methods and Protocols, edited by Curtis A. Machida, Humana Press, Totowa, NJ (2003). Virus-based nucleic acid delivery vectors typically are derived from animal viruses, such as adenoviruses, adeno-associated viruses (AAVs), retroviruses, lentiviruses, vaccinia viruses, herpes viruses, and papilloma viruses. In some cases, a SupRep nucleic acid construct can be delivered to cells using adeno-associated virus vectors (e.g., an AAV serotype 1 viral vector, an AAV serotype 2 viral vector, an AAV serotype 3 viral vector, an AAV serotype 4 viral vector, an AAV serotype 5 viral vector, an AAV serotype 6 viral vector, an AAV serotype 7 viral vector, an AAV serotype 8 viral vector, an AAV serotype 9 viral vector, an AAV serotype 10 viral vector, an AAV serotype 11 viral vector, an AAV serotype 12 viral vector, or a recombinant AAV serotype viral vector such as an AAV serotype 2/9 viral vector in which the AAV2 inverted terminal repeats and genome are contained within the AAV9 capsid, which can result in AAV9 tropism for cardiomyocytes), lentiviral vectors, retroviral vectors, adenoviral vectors, herpes simplex virus vectors, or poxvirus vector. In some cases, an AAV9 vector can be used to deliver one or more SupRep nucleic acids to cells.

[0162] In addition to nucleic acid encoding a suppressive component and nucleic acid encoding a corrective component, a viral vector can contain regulatory elements operably linked to the nucleic acid encoding the suppressive component and the corrective component. As used herein, “operably linked” refers to positioning of a regulatory element in a vector relative to a nucleic acid in such a way as to permit or facilitate expression of the encoded RNA and/or polypeptide. Such regulatory elements can include promoter sequences, enhancer sequences, response elements, signal peptides, internal ribosome entry sequences (IRES), P2A self-cleaving peptide sequences, polyadenylation signals, terminators, or inducible elements that modulate expression (e.g., transcription or translation) of a nucleic acid. The choice of element(s) that may be included in a viral vector depends on several factors, including, without limitation, inducibility, targeting, and the level of expression desired. For example, a promoter can be included in a viral vector to facilitate transcription of a nucleic acid encoding a suppressive component (e.g., a shRNA) and a corrective component (e.g., a WT polypeptide that is immune to the suppression by the suppressive component). A promoter can be constitutive or inducible (e.g., in the presence of tetracycline or rapamycin), and can affect the expression of a nucleic acid encoding a shRNA or a polypeptide in a general or tissue-specific manner. Examples of promoters that can be used to drive expression of suppressive and corrective components (e.g., in cardiomyocyte cells) include, without limitation, a U6 promoter, a H1 promoter a cytomegalovirus immediate-early (CMV) promoter, an alpha-myosin heavy chain promoter, a myosin light chain 2 promoter, cardiac troponin T, and a cardiac troponin C promoter.

[0163] As used herein, the term “AAV particle” refers to packaged capsid forms of the AAV virus that transmits its nucleic acid genome to cells. The term “viral genome” refers to one copy of a virus genome. Each virus particle contains one viral genome, and each AAV vector contains one viral genome. In some cases, a composition containing an AAV particle encoded by an AAV vector as provided herein can be administered at a concentration from about 10¹⁰ AAV particles/mL to about 10¹⁵ AAV particles/mL (e.g., from about 10¹⁰ AAV particles/mL to about 10¹¹ AAV particles/mL, from about 10¹⁰ AAV particles/mL to about 10¹² AAV particles/mL, from about 10¹⁰ AAV particles/mL to about 10¹³ AAV particles/mL, from about 10¹¹ AAV particles/mL to about 10¹² AAV particles/mL, from about 10¹¹ AAV particles/mL to about 10¹³ AAV particles/mL, from about 10¹¹ AAV particles/mL to about 10¹⁴ AAV particles/mL, from about 10¹² AAV particles/mL to about 10¹³ AAV particles/mL, from about 10¹² AAV particles/mL to about 10¹⁴ AAV particles/mL, or from about 10¹³ AAV particles/mL to about 10¹⁴ AAV particles/mL). In some cases, a composition containing an AAV particle encoded by an AAV vector as provided herein can be administered at a concentration from about 10¹⁰ viral genomes per kilogram body weight (vg/kg) to about 10¹⁵ vg/kg (e.g., from about 10¹⁰ to about 10¹¹ vg/kg, from about 10¹⁰ to about 10¹² vg/kg, from about 10¹⁰ to about 10¹³ vg/kg, from about 10¹¹ to about 10¹² vg/kg, from about 10¹¹ to about 10¹³ vg/kg, from about 10¹¹ to about 10¹⁴ vg/kg, from about 10¹² to about 10¹³ vg/kg, from about 10¹² to about 10¹⁴ vg/kg, or from about 10¹³ to about 10¹⁴ vg/kg).

[0164] In some cases, a SupRep nucleic acid construct can be administered to a mammal using a non-viral vector. Methods of using non-viral vectors for nucleic acid delivery are described elsewhere. See, for example, Gene Therapy Protocols (Methods in Molecular Medicine), edited by Jeffrey R. Morgan, Humana Press, Totowa, NJ (2002). For example, a SupRep nucleic acid encoding a suppressive component and a corrective component can be administered to a mammal by direct injection of nucleic acid molecules (e.g., plasmids) comprising SupRep nucleic acid, or by administering nucleic acid molecules complexed with lipids, polymers, or nanospheres. In some cases, a SupRep nucleic acid designed to express a suppressive component and a corrective component can be delivered to cells (e.g., cardiomyocytes) via direct injection (e.g., into the myocardium), intraperitoneal administration, intranasal administration, intravenous administration, intrathecal administration, intracerebral administration, intraparenchymal administration, or oral delivery in nanoparticles and/or drug tablets, capsules, or pills.

[0165] When KCNQ1-SupRep and/or KCNH2-SupRep and/or SCN5A-SupRep gene therapy is efficiently delivered to the majority of cardiomyocytes, the gene therapy-mediated restoration of repolarization reserve may distribute via gap junctions to partially or completely compensate for neighboring untransduced cardiomyocytes. From the studies described herein, it was noteworthy that during measurement of optical action potentials, no arrhythmic activity was observed in electrically coupled iPSC-CMs that had been transduced with KCNQ1-SupRep—suggesting that efficient transduction of cells may be sufficient to maintain normal rhythm and compensate for untransduced neighboring cells.

[0166] Any appropriate amount of a SupRep nucleic acid can be administered to a mammal (e.g., a human) having a congenital disorder. An effective amount of a SupRep nucleic acid can reduce one or more symptoms of the disorder being treated. In some cases, for example, effective suppression-and-replacement of KCNQ1 (e.g., for patients having LQT1, severe cases where multiple pathogenic variants in KCNQ1 are inherited such as autosomal recessive LQT1 and Jervell and Lange-Nielsen syndrome (JLNS), or type 2 SQTS (SQT2)) using KCNQ1-SupRep gene therapy can produce I_{Ks} current density similar to that of a healthy individual (e.g., within about 50%, about 25%, about 20%, about 15%, about 10%, or about 5% of the I_{Ks} current density of a healthy individual). Pathogenic variants in KCNQ1 that lead to a gain-of-function and an abnormal increase in I_{Ks} current density can lead to SQTS. In some cases, a therapeutically effective amount can provide enough I_{Ks} to ameliorate the LQTS phenotype without overcompensating and causing SQTS. In LQT1 and JLNS, disease severity correlates with the degree of lost I_{Ks} (Moss et al., Circulation, 115:2481-2489 (2007)). Heterozygous nonsense or frameshift mutations cause haploinsufficiency and typically result in mild LQT1 with −50% I_{Ks}. Dominant-negative missense mutations reduce I_{Ks} beyond 50% and are more strongly associated with breakthrough cardiac events. In the most severe cases, patients with JLNS inherit two mutant alleles that result in either minimal (<10%) or no I_{Ks} (Bhuiyan et al., Prog. Biophys. Mol. Biol., 98:319-327 (2008)). Conversely, KCNQ1 variants with substantial gain of function cause SQT2, though the exact degree of increased I_{Ks} is not well established (Chen et al., Science, 299:251-254 (2003); Bellocq et al., Circulation, 109:2394-2397 (2004); Hong et al., Cardiovasc. Res., 68:433-440 (2005); and Das et al., Heart Rhythm, 6:1146-1153 (2009)). Thus, the therapeutic window for KCNQ1-SupRep in humans may be relatively wide, allowing flexibility for achieving optimal efficacy. In some cases, KCNQ1-SupRep dosing can be modified by the promoters and/or enhancers driving expression, or by the amount of viral particles delivered to the mammal. In some cases, a therapeutically effective amount of a KCNQ1-SupRep construct can increase I_{Ks} by at least 25% (e.g., at least 50%, at least 60%, at least 70%, at least 75%, at least 80%, at least 90%, at least 100%, or at least 200%), as compared to the I_{Ks} prior to treatment.

[0167] In some cases, effective suppression-and-replacement of KCNH2 (e.g., for patients having LQT2 or type 1 short QT syndrome (SQT1)) using KCNH2-SupRep gene therapy can produce I_{Kr} current density similar to that of a healthy individual (e.g., within about 50%, about 25%, about 20%, about 15%, about 10%, or about 5% of the I_{Kr} current density of a healthy individual). In some cases, a therapeutically effective amount can provide enough I_{Kr} to ameliorate the LQTS phenotype without overcompensating and causing SQTS. Like LQT1, in LQT2, disease severity correlates with the degree of lost I_{Kr} (Moss et al., Circulation, 105:794-799 (2002)). Heterozygous nonsense or frameshift mutations cause haploinsufficiency and typically result in LQT2 with ˜50% I_{Kr}. Dominant-negative missense mutations reduce I_{Kr} beyond 50% and are more strongly associated with cardiac events, especially when localized to the pore region of the channel (Moss et al., supra). Conversely, KCNH2 variants with substantial gain of function can cause SQT1 (Brugada et al., Circulation, 109:30-35 (2004); and Sun et al., JMCC, 50:433-441 (2011)). Thus, the therapeutic window for KCNH2-SupRep in humans may be relatively wide, allowing flexibility for achieving optimal efficacy. In some cases, KCNH2-SupRep dosing can be modified by the promoters and/or enhancers driving expression, or by the amount of viral particles delivered to the mammal. In some cases, a therapeutically effective amount of a KCNH2-SupRep construct can increase I_{Kr} by at least 25% (e.g., at least 50%, at least 60%, at least 70%, at least 75%, at least 80%, at least 90%, at least 100%, or at least 200%), as compared to the I_{Kr} prior to treatment.

[0168] In some cases, effective suppression-and-replacement of SCN5A (e.g., for patients having LQT3, multifocal ectopic premature Purkinje-related contraction (MEPPC) syndrome, SCN5A-mediated dilated cardiomyopathy, recessive sick sinus syndrome, or BrS) using SCN5A-SupRep gene therapy can produce I_{Na} current density and sodium channel kinetics similar to that of a healthy individual (e.g., within about 50%, about 25%, about 20%, about 15%, about 10%, or about 5% of the I_{Na} current density of a healthy individual). In some cases, SCN5A-SupRep dosing can be modified by the promoters and/or enhancers driving expression, or by the amount of viral particles delivered to the mammal. In some cases, a therapeutically effective amount of a SCN5A-SupRep construct can suppress the amount of pathological increase in I_{Na} late current or window current by at least 25% (e.g., at least 50%, at least 60%, at least 70%, at least 75%, at least 80%, at least 90%, at least 100%, or at least 200%), as compared to the I_{Na} late current prior to treatment.

[0169] The typical QT range is about 350-450 ms for men and about 350-460 ms for women, but QT above about 430-440 generally is considered to be borderline high. The QT for males having LQTS is typically greater than 450 ms, and the QT for women having LQTS is typically greater than 460 ms. Most LQTS patients top out at less than 520 ms. In some cases, an effective amount of a KCNQ1-SupRep construct and/or a KCNH2-SupRep construct and/or a SCN5A-SupRep construct administered to a mammal (e.g., a human) having LQT1 and/or LQT2 and/or LQT3 can shorten the APD to a length similar to that of a healthy individual, such that the APD is within the normal range. In some cases, an effective amount of a KCNQ1-SupRep construct and/or a KCNH2-SupRep construct and/or a SCN5A-SupRep construct administered to a mammal (e.g., a human) having LQT1 and/or LQT2 and/or LQT3 can shorten the APD to a length that is within about 10% (e.g., within about 8%, about 5%, or about 3%, of the APD of a healthy individual). In some cases, a therapeutically effective amount of a KCNQ1-SupRep construct and/or a KCNH2-SupRep construct and/or a SCN5A-SupRep construct to a mammal (e.g., a human) having LQT1 and/or LQT2 and/or LQT3 can shorten the APD by at least 10% (e.g., at least 15%, at least 20%, at least 25%, at least 30%, at least 40%, or at least 50%), as compared to the APD prior to treatment.

[0170] In some cases, symptoms can be assessed on the day of treatment, 1 day post treatment, 3 months post treatment, 6 months post treatment, 1 year post treatment and every year thereafter post treatment. In some cases, symptoms can be assessed between 1 day post treatment and 7 days post treatment (e.g., between 1 day and 2 days post treatment, between 1 day and 3 days post treatment, between 1 day and 4 days post treatment, between 2 days and 3 days post treatment, between 2 days and 4 days post treatment, between 2 days and 5 days post treatment, between 3 days and 4 days post treatment, between 3 days and 5 days post treatment, 3 days and 6 days post treatment, between 4 days and 5 days post treatment, between 4 days and 6 days post treatment, between 4 days and 7 days post treatment, between 5 days and 6 days post treatment, between 5 days and 7 days post treatment, or between 6 days and 7 days post treatment). In some cases, symptoms can be assessed between 1 week post treatment and 4 weeks post treatment (e.g., between 1 week and 2 weeks post treatment, between 1 week and 3 weeks post treatment, between 1 week and 4 weeks post treatment, between 2 weeks and 3 weeks post treatment, between 2 weeks and 4 weeks post treatment, or between 3 weeks and 4 weeks post treatment). In some cases, symptoms can be assessed between 1 month post treatment and 12 months post treatment (e.g., between 1 month and 2 months post treatment, between 1 month and 3 months post treatment, between 1 month and 4 months post treatment, between 2 months and 3 months post treatment, between 2 months and 4 months post treatment, between 2 months and 5 months post treatment, between 3 months and 4 months post treatment, between 3 months and 5 months post treatment, between 3 months and 6 months post treatment, between 4 months and 5 months post treatment, between 4 and 6 months post treatment, between 4 months and 7 months post treatment, between 5 months and 6 months post treatment, between 5 months and 7 months post treatment, between 5 months and 8 months post treatment, between 6 months and 7 months post treatment, between 6 months and 8 months post treatment, between 6 months and 9 months post treatment, between 7 months and 8 months post treatment, between 7 months and 9 months post treatment, between 7 months and 10 months post treatment, between 8 months and 9 months post treatment, between 8 months and 10 months post treatment, between 8 months and 11 months post treatment, between 9 months and 10 months post treatment, between 9 months and 11 months post treatment, between 9 months and 12 months post treatment, between 10 months and 11 months post treatment, between 10 months and 12 months post treatment, or between 11 months and 12 months post treatment). In some cases, symptoms can be assessed between 1 year post treatment and about 20 years post treatment (e.g., between 1 year and 5 years post treatment, between 1 year and 10 years post treatment, between 1 year and 15 years post treatment, between 5 years and 10 years post treatment, between 5 years and 15 years post treatment, between 5 years and 20 years post treatment, between 10 years and 15 years post treatment, between 10 years and 20 years post treatment, or between 15 years and 20 years post treatment).

[0171] In some cases, a treatment as provided herein can be administered to a mammal (e.g., a human) having a congenital disease (e.g., a congenital heart disease such as LQTS, or more specifically, LQT1 or LQT2 or LQT3) in a single dose, without further administration.

[0172] In some cases, a treatment as provided herein can be administered to a mammal (e.g., a human) having a congenital disease (e.g., a congenital heart disease such as LQTS, or more specifically, LQT1) at least once daily, or at least once weekly for at least two consecutive days or weeks. In some cases, a treatment as provided herein is administered to a mammal (e.g., a human) having a congenital disease at least 3, 4, 5, 6, 7, 8, 9, 10, 11, 12, 13, 14, or 15 consecutive days or weeks. In some cases, a treatment as provided herein is administered to a mammal (e.g., a human) having a congenital disease at least once daily or at least once weekly for at least 1, 2, 3, 4, 5, 6, 7, 8, 9, 10, 11, or 12 consecutive weeks. In some cases, a treatment as provided herein is administered to a mammal (e.g., a human) having a congenital disease at least once daily or at least once weekly for at most 4, 5, 6, 7, 8, 9, 10, 11, 12, 13, 14, 15, 16, 17, 18, 19, or 20 consecutive days or weeks. In some cases, a treatment as provided herein is administered to a mammal (e.g., a human) having a congenital disease at least once weekly for at most 1, 2, 3, 4, 5, 6, 7, 8, 9, 10, 11, or 12 consecutive weeks or months. In some cases, a treatment as provided herein is administered to a mammal (e.g., a human) having a congenital disease at least 1, 2, 3, 4, 5, 6, 7, 8, 9, 10, 11, or 12 consecutive months or years, chronically for a subject's entire life span, or an indefinite period of time.

[0173] In one embodiment, a mammal having LQT1 or SQTS associated with a pathogenic mutation in the KCNQ1 gene can be identified by, for example, analyzing a biological sample (e.g., analyzing a blood sample using PCR and/or DNA sequencing methods) obtained from the mammal to determine whether DNA in the sample includes a pathogenic mutation in the KCNQ1 gene. Pathogenic mutations in or encoded by or encoded by the KCNQ1 gene include, without limitation, c.421G>A (p.V141M), c.919G>C (p.V307L), c.513C>A (p.Y171X), c.760G>A (p.V254M), c.1700T>G (p.I567S), c.1377C>T (p.D459D), c.1380C>A (p.G460G), c.1383T>C (p.Y461Y), c.1386C>T (p.D462D), c.1389T>C (p.S463S), c.1392T>C (p.S464S), c.1395A>C (p.V465V), c.1398G>A (p.R466R), c.1401G>A (p.K467K), and c.1404C>T (p.S468S). See, also, Wu et al., J Arrhythm. 2016, 32(5):381-388; Hedley et al., Hum Mutat. 2009, 30:1486-1551; and Morita et al., Lancet 2008, 372:750-763. SupRep constructs targeted to mutant KCNQ1 alleles can be designed to suppress the mutant KCNQ1 alleles and replace them with a wild type KCNQ1 allele. SupRep constructs targeted to mutant KCNQ1 alleles can be designed and prepared using methods described, for example, in the Examples herein. For example, a SupRep construct can be generated to target a KCNQ1 allele containing a pathogenic mutation, either by targeting a region of a disease-associated KCNQ1 allele that contains a pathogenic mutation, or by targeting a region of a disease-associated KCNQ1 allele that does not contain a pathogenic mutation. The SupRep constructs can be tested for their ability to suppress a mutant KCNQ1 allele and replace it with a wild type KCNQ1 allele. For example, constructs can be tested in an in vitro model system by co-transfecting cultured cells with a wild type KCNQ1 construct and a shKCNQ1 construct, and measuring KCNQ1 expression with qRT-PCR and/or western blotting. A construct having a relatively high ability to knock down KCNQ1 expression (e.g., the ability to knock down at least 70 percent, at least 75 percent, at least 80 percent, at least 85 percent, at least 90 percent, at least 95 percent, at least 98 percent, or at least 99 percent of KCNQ1 expression at the mRNA and/or protein level) can be selected. The selected construct can be packaged in a virus particle (e.g., an AAV particle) and delivered to a mammal identified as having a pathogenic mutation in the KCNQ1 gene at a dose of, for example, about 10¹⁰ vg/kg to about 10¹⁵ vg/kg, or about 10¹⁰ AAV particles/mL to about 10¹⁵ AAV particles/mL, using any appropriate route of administration (e.g., via direct injection into a tissue such as the myocardium, or via intraperitoneal administration, intranasal administration, intravenous administration, intrathecal administration, intracerebral administration, intraparenchymal administration, or oral delivery in nanoparticles and/or drug tablets, capsules, or pills). In some cases, a SupRep construct targeted to KCNQ1 can be administered to a mammal in a non-viral vector (e.g., in a plasmid or in a nucleic acid molecule complexed with lipids, polymers, or nanospheres), and can be delivered by direct injection to a tissue (e.g., the myocardium), or by intraperitoneal, intranasal, intravenous, intrathecal, intracerebral, or intraparenchymal administration, or by oral delivery. After administration, the mammal can be monitored for symptoms of LQT1 or SQTS, to determine whether one or more symptoms of the disorder are diminished. For example, effective SupRep treatment of a mammal having LQT1 or SQTS associated with a pathogenic mutation in KCNQ1 can result in a reduction in symptoms such as rapid heartbeat, fainting, and/or seizures. In some cases, effective SupRep treatment of a mammal having LQT1 or SQTS associated with a pathogenic KCNQ1 mutation can result in an I_{Ks} current density and/or cardiac APD that is similar to the I_{Ks} current density and/or cardiac APD of a healthy individual.

[0174] In another embodiment, a mammal having LQT2 or SQTS associated with a pathogenic mutation in the KCNH2 gene can be identified by, for example, analyzing a biological sample (e.g., analyzing a blood sample using PCR and/or DNA sequencing methods) obtained from the mammal to determine whether DNA in the sample includes a pathogenic mutation in the KCNH2 gene. Pathogenic mutations in or encoded by the KCNH2 gene include, without limitation, c.1764C>G (p.N588K), c.82A>G (p.K28E), c.2893G>T (p.G965X), c.3036_3048del (p.R1014fs), and c.3107_3111dup (p.V1038fs). See, also, Hedley et al., Hum Mutat. 2009, 30:1486-1551; Curran et al., Cell 1995, 80:795-803; and Smith et al., J Arrhythm. 2016, 32(5):373-380. SupRep constructs targeted to mutant KCNH2 alleles can be designed to suppress the mutant KCNH2 alleles and replace them with a wild type KCNH2 allele. SupRep constructs targeted to mutant KCNH2 alleles can be designed and prepared using methods described, for example, in the Examples herein. For example, a SupRep construct can be generated to target a KCNH2 allele containing a pathogenic mutation, either by targeting a region of a disease-associated KCNH2 allele that contains a pathogenic mutation, or by targeting a region of a disease-associated KCNH2 allele that does not contain a pathogenic mutation. The SupRep constructs can be tested for their ability to suppress a mutant KCNH2 allele and replace it with a wild type KCNH2 allele. For example, constructs can be tested in an in vitro model system by co-transfecting cultured cells with a wild type KCNH2 construct and a shKCNH2 construct, and measuring KCNH2 expression with qRT-PCR and/or western blotting. A construct having a relatively high ability to knock down KCNH2 expression (e.g., the ability to knock down at least 70 percent, at least 75 percent, at least 80 percent, at least 85 percent, at least 90 percent, at least 95 percent, at least 98 percent, or at least 99 percent of KCNH2 expression at the mRNA and/or protein level) can be selected. The selected construct can be packaged in a virus particle (e.g., an AAV particle) and delivered to a mammal identified as having a pathogenic mutation in the KCNH2 gene at a dose of, for example, about 10¹⁰ vg/kg to about 10¹⁵ vg/kg, or about 10¹⁰ AAV particles/mL to about 10¹⁵ AAV particles/mL, using any appropriate route of administration (e.g., via direct injection into a tissue such as the myocardium, or via intraperitoneal administration, intranasal administration, intravenous administration, intrathecal administration, intracerebral administration, intraparenchymal administration, or oral delivery in nanoparticles and/or drug tablets, capsules, or pills). In some cases, a SupRep construct targeted to KCNH2 can be administered to a mammal in a non-viral vector (e.g., in a plasmid or in a nucleic acid molecule complexed with lipids, polymers, or nanospheres), and can be delivered by direct injection to a tissue (e.g., the myocardium), or by intraperitoneal, intranasal, intravenous, intrathecal, intracerebral, or intraparenchymal administration, or by oral delivery. After administration, the mammal can be monitored for symptoms of LQT2 or SQTS, to determine whether one or more symptoms of the disorder are diminished. For example, effective SupRep treatment of a mammal having LQT2 or SQTS associated with a pathogenic mutation in KCNH2 can result in a reduction in symptoms such as rapid heartbeat, fainting (e.g., during periods of strenuous exercise or emotional distress), and/or seizures. In some cases, effective SupRep treatment of a mammal having LQT2 or SQTS associated with a pathogenic KCNH2 mutation can result in shortening of the APD to a length similar to that of a healthy individual, such that the APD is within the normal range.

[0175] In another embodiment, a mammal having LQT3 or BrS associated with a pathogenic mutation in the SCN5A gene can be identified by, for example, analyzing a biological sample (e.g., analyzing a blood sample using PCR and/or DNA sequencing methods) obtained from the mammal to determine whether DNA in the sample includes a pathogenic mutation in the SCN5A gene. Pathogenic mutations in or encoded by the SCN5A gene include, without limitation, c.100C>T (p.R34C), c.1571C>A (p.S524Y), c.1673A>G (p.H558R), c.3308C>A (p.S1103Y), c.3578G>A (p.R1193Q), c.3908C>T (p.T1304M), c.4509_4516del (p.1505-1507del), c.4865G>A (p.R1623Q), and c.5851G>T (p.V1951L). See, also, Kapa et al., Circulation 2009, 120:1752-1760; and Hedley et al., Hum Mutat. 2009, 30:1486-1551. SupRep constructs targeted to mutant SCN5A alleles can be designed to suppress the mutant SCN5A alleles and replace them with a wild type SCN5A allele. SupRep constructs targeted to mutant SCN5A alleles can be designed and prepared using methods described, for example, in the Examples herein. For example, a SupRep construct can be generated to target a SCN5A allele containing a pathogenic mutation, either by targeting a region of a disease-associated SCN5A allele that contains a pathogenic mutation, or by targeting a region of a disease-associated SCN5A allele that does not contain a pathogenic mutation. The SupRep constructs can be tested for their ability to suppress a mutant SCN5A allele and replace it with a wild type gene allele. For example, constructs can be tested in an in vitro model system by co-transfecting cultured cells with a wild type SCN5A construct and a shSCN5A construct, and measuring SCN5A expression with qRT-PCR and/or western blotting. A construct having a relatively high ability to knock down SCN5A expression (e.g., the ability to knock down at least 70 percent, at least 75 percent, at least 80 percent, at least 85 percent, at least 90 percent, at least 95 percent, at least 98 percent, or at least 99 percent of SCN5A expression at the mRNA and/or protein level) can be selected. The selected construct can be packaged in a virus particle (e.g., an AAV particle) and delivered to a mammal identified as having a pathogenic mutation in the SCN5A gene at a dose of, for example, about 10¹⁰ vg/kg to about 10¹⁵ vg/kg, or about 10¹⁰ AAV particles/mL to about 10¹⁵ AAV particles/mL, using any appropriate route of administration (e.g., via direct injection into a tissue such as the myocardium, or via intraperitoneal administration, intranasal administration, intravenous administration, intrathecal administration, intracerebral administration, intraparenchymal administration, or oral delivery in nanoparticles and/or drug tablets, capsules, or pills). In some cases, a SupRep construct targeted to SCN5A can be administered to a mammal in a non-viral vector (e.g., in a plasmid or in a nucleic acid molecule complexed with lipids, polymers, or nanospheres), and can be delivered by direct injection to a tissue (e.g., the myocardium), or by intraperitoneal, intranasal, intravenous, intrathecal, intracerebral, or intraparenchymal administration, or by oral delivery. After administration, the mammal can be monitored for symptoms of LQT3 or BrS, to determine whether one or more symptoms of the disorder are diminished. For example, effective SupRep treatment of a mammal having LQT3 or BrS associated with a pathogenic mutation in SCN5A can result in a reduction in symptoms such as fainting and/or seizures. In some cases, effective SupRep treatment of a mammal having LQT3 or BrS associated with a pathogenic SCN5A mutation can result in shortening of the APD to a length similar to that of a healthy individual, such that the APD is within the normal range.

[0176] In another embodiment, a mammal having HCM or DCM associated with a pathogenic mutation in the MYH7 gene can be identified by, for example, analyzing a biological sample (e.g., analyzing a blood sample using PCR and/or DNA sequencing methods) obtained from the mammal to determine whether DNA in the sample includes a pathogenic mutation in the MYH7 gene. Pathogenic mutations in or encoded by the MYH7 gene include, without limitation, c.1156T>C (p.Y386H), c.1680T>C (p.S532P), c.1816G>A (p.V606M), c.2602G>C (p.A868P), c.2945T>C (p.M982T), c.4258A>T (p.R1420W), and c.5779A>T (p.I1927F). See, also, Millat et al., Eur J Med Genet. 2010, 53:261-267; Van Driest et al., Mayo Clin Proc 2005, 80(4):463-469; references. SupRep constructs targeted to mutant MYH7 alleles can be designed to suppress the mutant MYH7 alleles and replace them with a wild type MYH7 allele. SupRep constructs targeted to mutant MYH7 alleles can be designed and prepared using methods described, for example, in the Examples herein. For example, a SupRep construct can be generated to target a MYH7 allele containing a pathogenic mutation, either by targeting a region of a disease-associated MYH7 allele that contains a pathogenic mutation, or by targeting a region of a disease-associated MYH7 allele that does not contain a pathogenic mutation. The SupRep constructs can be tested for their ability to suppress a mutant MYH7 allele and replace it with a wild type gene allele. For example, constructs can be tested in an in vitro model system by co-transfecting cultured cells with a wild type MYH7 construct and a shMYH7 construct, and measuring MYH7 expression with qRT-PCR and/or western blotting. A construct having a relatively high ability to knock down MYH7 expression (e.g., the ability to knock down at least 70 percent, at least 75 percent, at least 80 percent, at least 85 percent, at least 90 percent, at least 95 percent, at least 98 percent, or at least 99 percent of MYH7 expression at the mRNA and/or protein level) can be selected. The selected construct can be packaged in a virus particle (e.g., an AAV particle) and delivered to a mammal identified as having a pathogenic mutation in the MYH7 gene at a dose of, for example, about 10¹⁰ vg/kg to about 10¹⁵ vg/kg, or about 10¹⁰ AAV particles/mL to about 10¹⁵ AAV particles/mL, using any appropriate route of administration (e.g., via direct injection into a tissue such as the myocardium, or via intraperitoneal administration, intranasal administration, intravenous administration, intrathecal administration, intracerebral administration, intraparenchymal administration, or oral delivery in nanoparticles and/or drug tablets, capsules, or pills). In some cases, a SupRep construct targeted to MYH7 can be administered to a mammal in a non-viral vector (e.g., in a plasmid or in a nucleic acid molecule complexed with lipids, polymers, or nanospheres), and can be delivered by direct injection to a tissue (e.g., the myocardium), or by intraperitoneal, intranasal, intravenous, intrathecal, intracerebral, or intraparenchymal administration, or by oral delivery. After administration, the mammal can be monitored for symptoms of HCM or DCM, to determine whether one or more symptoms of the disorder are diminished. For example, effective SupRep treatment of a mammal having HCM or DCM associated with a pathogenic mutation in MYH7 can result in a reduction in symptoms such as dyspnea, fatigue, edema of the legs and/or ankles, chest pain, arrhythmia, fainting, lightheadedness, and/or heart palpitations. In some cases, effective SupRep treatment of a mammal having HCM or DCM associated with a pathogenic MYH7 mutation can result in reduced cardiac hypertrophy and cardiomyocyte size, and/or decreased interstitial fibrosis and myocardial disarray.

[0177] In another embodiment, a mammal having ACM associated with a pathogenic mutation in the DSP gene can be identified by, for example, analyzing a biological sample (e.g., analyzing a blood sample using PCR and/or DNA sequencing methods) obtained from the mammal to determine whether DNA in the sample includes a pathogenic mutation in the DSP gene. Pathogenic mutations in or encoded by the DSP gene include, without limitation, c.151C>T (p.N51X), c.478C>T (p. R160X), c.897C>G (p.S299R), c.1264G>A (p.E422K), c.1333A>G (p.I445V), c. 3160_3169delAAGAACAA (p.K1052fsX26), c.3337C>T (p. R1113X), c.4775A>G (p.K1592R), c.5212C>T (p. R1738X), c.6478C>T (p.R2160X), and c.6496C>T (p.R2166X). See, also, Bhonsale et al., Eur Heart J. 2015, 36(14):847-855; Sen-Chowdhry et al., Circulation 2007, 115:1710-1720; and Norman et al., Circulation 2005, 112:636-642. SupRep constructs targeted to mutant DSP alleles can be designed to suppress the mutant DSP alleles and replace them with a wild type DSP allele. SupRep constructs targeted to mutant DSP alleles can be designed and prepared using methods described, for example, in the Examples herein. For example, a SupRep construct can be generated to target a DSP allele containing a pathogenic mutation, either by targeting a region of a disease-associated DSP allele that contains a pathogenic mutation, or by targeting a region of a disease-associated DSP allele that does not contain a pathogenic mutation. The SupRep constructs can be tested for their ability to suppress a mutant DSP allele and replace it with a wild type DSP allele. For example, constructs can be tested in an in vitro model system by co-transfecting cultured cells with a wild type DSP construct and a shDSP construct, and measuring DSP expression with qRT-PCR and/or western blotting. A construct having a relatively high ability to knock down DSP expression (e.g., the ability to knock down at least 70 percent, at least 75 percent, at least 80 percent, at least 85 percent, at least 90 percent, at least 95 percent, at least 98 percent, or at least 99 percent of DSP expression at the mRNA and/or protein level) can be selected. The selected construct can be packaged in a virus particle (e.g., an AAV particle) and delivered to a mammal identified as having a pathogenic mutation in the DSP gene at a dose of, for example, about 10¹⁰ vg/kg to about 10¹⁵ vg/kg, or about 10¹⁰ AAV particles/mL to about 10¹⁵ AAV particles/mL, using any appropriate route of administration (e.g., via direct injection into a tissue such as the myocardium, or via intraperitoneal administration, intranasal administration, intravenous administration, intrathecal administration, intracerebral administration, intraparenchymal administration, or oral delivery in nanoparticles and/or drug tablets, capsules, or pills). In some cases, a SupRep construct targeted to DSP can be administered to a mammal in a non-viral vector (e.g., in a plasmid or in a nucleic acid molecule complexed with lipids, polymers, or nanospheres), and can be delivered by direct injection to a tissue (e.g., the myocardium), or by intraperitoneal, intranasal, intravenous, intrathecal, intracerebral, or intraparenchymal administration, or by oral delivery. After administration, the mammal can be monitored for symptoms of ACM, to determine whether one or more symptoms of the disorder are diminished. For example, effective SupRep treatment of a mammal having ACM associated with a pathogenic mutation in DSP can result in a reduction in symptoms such as fibrofatty replacement of the myocardium, ventricular arrhythmias, syncope, sustained ventricular tachycardia (VT) or fibrillation (VF), and/or heart failure. In some cases, effective SupRep treatment of a mammal having ACM associated with a pathogenic DSP mutation can result a reduction in LV inflammation, fibrosis, and/or systolic dysfunction.

[0178] In another embodiment, a mammal having HCM associated with a pathogenic mutation in the MYBPC3 gene can be identified by, for example, analyzing a biological sample (e.g., analyzing a blood sample using PCR and/or DNA sequencing methods) obtained from the mammal to determine whether DNA in the sample includes a pathogenic mutation in the MYBPC3 gene. Pathogenic mutations in or encoded by the MYBPC3 gene include, without limitation, c.3535G>A (p.E1179K), c.3413G>A (p.R1138H), c.3392T>C (p.I1131T), c.3106C>T (p.R1036C), c.3004C>T (p.R1002W), c.2992C>G (p.Q998E), c.2870C>G (p.T957S), c.2686G>A (p.V896M), c.2498C>T (p.A833V), c.2497G>A (p.A833T), c.1144C>T (p.R382TW), c.977G>A (p.R326Q), c.706A>G (p.S236G), and c.472G>A (p.V158M). See, also, Helms et al., Circ: Gen Precision Med. 2020, 13:396-405; Carrier et al., Gene. 2015, 573(2):188-197; Millat et al., supra; and Page et al., Circ Cardiovasc Genet. 2012, 5:156-166. SupRep constructs targeted to mutant MYBPC3 alleles can be designed to suppress the mutant MYBPC3 alleles and replace them with a wild type MYBPC3 allele. SupRep constructs targeted to mutant MYBPC3 alleles can be designed and prepared using methods described, for example, in the Examples herein. For example, a SupRep construct can be generated to target a MYBPC3 allele containing a pathogenic mutation, either by targeting a region of a disease-associated MYBPC3 allele that contains a pathogenic mutation, or by targeting a region of a disease-associated MYBPC3 allele that does not contain a pathogenic mutation. The SupRep constructs can be tested for their ability to suppress a mutant MYBPC3 allele and replace it with a wild type MYBPC3 allele. For example, constructs can be tested in an in vitro model system by co-transfecting cultured cells with a wild type MYBPC3 construct and a shMYBPC3 construct, and measuring MYBPC3 expression with qRT-PCR and/or western blotting. A construct having a relatively high ability to knock down MYBPC3 expression (e.g., the ability to knock down at least 70 percent, at least 75 percent, at least 80 percent, at least 85 percent, at least 90 percent, at least 95 percent, at least 98 percent, or at least 99 percent of MYBPC3 expression at the mRNA and/or protein level) can be selected. The selected construct can be packaged in a virus particle (e.g., an AAV particle) and delivered to a mammal identified as having a pathogenic mutation in the MYBPC3 gene at a dose of, for example, about 10¹⁰ vg/kg to about 10¹⁵ vg/kg, or about 10¹⁰ AAV particles/mL to about 10¹⁵ AAV particles/mL, using any appropriate route of administration (e.g., via direct injection into a tissue such as the myocardium, or via intraperitoneal administration, intranasal administration, intravenous administration, intrathecal administration, intracerebral administration, intraparenchymal administration, or oral delivery in nanoparticles and/or drug tablets, capsules, or pills). In some cases, a SupRep construct targeted to MYBPC3 can be administered to a mammal in a non-viral vector (e.g., in a plasmid or in a nucleic acid molecule complexed with lipids, polymers, or nanospheres), and can be delivered by direct injection to a tissue (e.g., the myocardium), or by intraperitoneal, intranasal, intravenous, intrathecal, intracerebral, or intraparenchymal administration, or by oral delivery. After administration, the mammal can be monitored for symptoms of HCM, to determine whether one or more symptoms of the disorder are diminished. For example, effective SupRep treatment of a mammal having HCM associated with a pathogenic mutation in MYBPC3 can result in a reduction in symptoms such as dyspnea, rapid heartbeat, chest pain, fainting, dizziness, and/or fatigue. In some cases, effective SupRep treatment of a mammal having HCM associated with a pathogenic MYBPC3 mutation can result in reduced contractility, improved relaxation, and/or reduced energy consumption.

[0179] In another embodiment, a mammal having DCM associated with a pathogenic mutation in the RBM20 gene can be identified by, for example, analyzing a biological sample (e.g., analyzing a blood sample using PCR and/or DNA sequencing methods) obtained from the mammal to determine whether DNA in the sample includes a pathogenic mutation in the RBM20 gene. Pathogenic mutations in or encoded by the RBM20 gene include, without limitation, c.1913C>T (p.P638L), c.1901G>A (p.R634Q), c.1906C>A (p.R636S), c.1907G>A (p.R636H), c.1909A>G (p.S637G), c.1661G>A (p.V535I), c.1958C>T (p.R634W), c.1964C>T (p.R636C), and c.2205G>A (p.R716Q). See, also, Brauch et al., J Am Coll Cardiol. 2009, 54:930-941; Li et al., Clin Transl Sci. 2010, 3:90-97; and Refaat et al., Heart Rhythm. 2012, 9:390-396. SupRep constructs targeted to mutant RBM20 alleles can be designed to suppress the mutant RBM20 alleles and replace them with a wild type RBM20 allele. SupRep constructs targeted to mutant RBM20 alleles can be designed and prepared using methods described, for example, in the Examples herein. For example, a SupRep construct can be generated to target a RBM20 allele containing a pathogenic mutation, either by targeting a region of a disease-associated RBM20 allele that contains a pathogenic mutation, or by targeting a region of a disease-associated RBM20 allele that does not contain a pathogenic mutation. The SupRep constructs can be tested for their ability to suppress a mutant RBM20 allele and replace it with a wild type RBM20 allele. For example, constructs can be tested in an in vitro model system by co-transfecting cultured cells with a wild type RBM20 construct and a shRBM20 construct, and measuring RBM20 expression with qRT-PCR and/or western blotting. A construct having a relatively high ability to knock down RBM20 expression (e.g., the ability to knock down at least 70 percent, at least 75 percent, at least 80 percent, at least 85 percent, at least 90 percent, at least 95 percent, at least 98 percent, or at least 99 percent of RBM20 expression at the mRNA and/or protein level) can be selected. The selected construct can be packaged in a virus particle (e.g., an AAV particle) and delivered to a mammal identified as having a pathogenic mutation in the RBM20 gene at a dose of, for example, about 10¹⁰ vg/kg to about 10¹⁵ vg/kg, or about 10¹⁰ AAV particles/mL to about 10¹⁵ AAV particles/mL, using any appropriate route of administration (e.g., via direct injection into a tissue such as the myocardium, or via intraperitoneal administration, intranasal administration, intravenous administration, intrathecal administration, intracerebral administration, intraparenchymal administration, or oral delivery in nanoparticles and/or drug tablets, capsules, or pills). In some cases, a SupRep construct targeted to RBM20 can be administered to a mammal in a non-viral vector (e.g., in a plasmid or in a nucleic acid molecule complexed with lipids, polymers, or nanospheres), and can be delivered by direct injection to a tissue (e.g., the myocardium), or by intraperitoneal, intranasal, intravenous, intrathecal, intracerebral, or intraparenchymal administration, or by oral delivery. After administration, the mammal can be monitored for symptoms of DCM, to determine whether one or more symptoms of the disorder are diminished. For example, effective SupRep treatment of a mammal having DCM associated with a pathogenic mutation in RBM20 can result in a reduction in symptoms such as dyspnea, fatigue, edema of the legs and/or ankles, chest pain, arrhythmia, fainting, lightheadedness, and/or heart palpitations. In some cases, effective SupRep treatment of a mammal having DCM associated with a pathogenic RBM20 mutation can result in normalization of LV size and/or strengthening of the LV.

[0180] In another embodiment, a mammal having LQTS or Timothy syndrome associated with a pathogenic mutation in the CACNA1C gene can be identified by, for example, analyzing a biological sample (e.g., analyzing a blood sample using PCR and/or DNA sequencing methods) obtained from the mammal to determine whether DNA in the sample includes a pathogenic mutation in the CACNA1C gene. Pathogenic mutations in or encoded by the CACNA1C gene include, without limitation, c.2570C>G (p.P857R), c.2500A>G (p.K834Q), c.2570C>T (p.P857L), c.5717G>A (p.R1906Q), c.82G>A (p.A28T), c.2578C>G (p.R860G), c.3497T>C (p.I166T), c.3496A>G (p.I1166V), c.4425C>G (p.I1475M), and c.4486G>A (p.E1496K). See, also, Boczek et al., Circ Cardiovasc Genet. 2013, 6(3):279-289; Wemhoner et al., J Mol Cell Cardiol. 2015, 80:186-195; references. SupRep constructs targeted to mutant CACNA1C alleles can be designed to suppress the mutant CACNA1C alleles and replace them with a wild type CACNA1C allele. SupRep constructs targeted to mutant CACNA1C alleles can be designed and prepared using methods described, for example, in the Examples herein. For example, a SupRep construct can be generated to target a CACNA1C allele containing a pathogenic mutation, either by targeting a region of a disease-associated CACNA1C allele that contains a pathogenic mutation, or by targeting a region of a disease-associated CACNA1C allele that does not contain a pathogenic mutation. The SupRep constructs can be tested for their ability to suppress a mutant CACNA1C allele and replace it with a wild type CACNA1C allele. For example, constructs can be tested in an in vitro model system by co-transfecting cultured cells with a wild type CACNA1C construct and a shCACNA1C construct, and measuring CACNA1C expression with qRT-PCR and/or western blotting. A construct having a relatively high ability to knock down CACNA1C expression (e.g., the ability to knock down at least 70 percent, at least 75 percent, at least 80 percent, at least 85 percent, at least 90 percent, at least 95 percent, at least 98 percent, or at least 99 percent of CACNA1C expression at the mRNA and/or protein level) can be selected. The selected construct can be packaged in a virus particle (e.g., an AAV particle) and delivered to a mammal identified as having a pathogenic mutation in the CACNA1C gene at a dose of, for example, about 10¹⁰ vg/kg to about 10¹⁵ vg/kg, or about 10¹⁰ AAV particles/mL to about 10¹⁵ AAV particles/mL, using any appropriate route of administration (e.g., via direct injection into a tissue such as the myocardium, or via intraperitoneal administration, intranasal administration, intravenous administration, intrathecal administration, intracerebral administration, intraparenchymal administration, or oral delivery in nanoparticles and/or drug tablets, capsules, or pills). In some cases, a SupRep construct targeted to CACNA1C can be administered to a mammal in a non-viral vector (e.g., in a plasmid or in a nucleic acid molecule complexed with lipids, polymers, or nanospheres), and can be delivered by direct injection to a tissue (e.g., the myocardium), or by intraperitoneal, intranasal, intravenous, intrathecal, intracerebral, or intraparenchymal administration, or by oral delivery. After administration, the mammal can be monitored for symptoms of LQTS or Timothy syndrome, to determine whether one or more symptoms of the disorder are diminished. For example, effective SupRep treatment of a mammal having LQTS or Timothy syndrome associated with a pathogenic mutation in CACNA1C can result in a reduction in symptoms such as rapid heartbeat, fainting, seizures, episodes of hypoglycemia, and/or episodes of hypothermia. In some cases, effective SupRep treatment of a mammal having LQTS or Timothy syndrome associated with a pathogenic CACNA1C mutation can result in an I_{Ks} current density and/or cardiac APD that is similar to the I_{Ks} current density and/or cardiac APD of a healthy individual.

[0181] In another embodiment, a mammal having ACM associated with a pathogenic mutation in the PKP2 gene can be identified by, for example, analyzing a biological sample (e.g., analyzing a blood sample using PCR and/or DNA sequencing methods) obtained from the mammal to determine whether DNA in the sample includes a pathogenic mutation in the PKP2 gene. Pathogenic mutations in or encoded by the PKP2 gene include, without limitation, c.235C>T (p.R79X), c.397C>T (p.Q133X), c.2386T>C (p.C796R), c.2011delC (p.P671fsX683), c.1368delA (p.N456fsX458), c.145-148delCAGA (p.S50fsX110), c.2509delA (p.V837fsX930), c.2489+1G>A (p.mutant splice product), c.1171-2A>G (p.mutant splice product), c.2146-1G>C (p.mutant splice product), c.2197-2202insGdelCACACC (p.A733fsX740), c.1613G>A (p.W538X), c.1271T>C (p.F424S), c.1642delG (p.V548fsX562), and c.419C>T (p.S140F). See, also, Dalal et al., Circulation. 2006, 113:1641-1649; van Tintelen et al., Circulation. 2006, 113(13):1650-1658; and Fressart et al., Europace. 2010, 12(6):861-868. SupRep constructs targeted to mutant PKP2 alleles can be designed to suppress the mutant PKP2 alleles and replace them with a wild type PKP2 allele. SupRep constructs targeted to mutant PKP2 alleles can be designed and prepared using methods described, for example, in the Examples herein. For example, a SupRep construct can be generated to target a PKP2 allele containing a pathogenic mutation, either by targeting a region of a disease-associated PKP2 allele that contains a pathogenic mutation, or by targeting a region of a disease-associated PKP2 allele that does not contain a pathogenic mutation. The SupRep constructs can be tested for their ability to suppress a mutant PKP2 allele and replace it with a wild type PKP2 allele. For example, constructs can be tested in an in vitro model system by co-transfecting cultured cells with a wild type PKP2 construct and a shPKP2 construct, and measuring PKP2 expression with qRT-PCR and/or western blotting. A construct having a relatively high ability to knock down PKP2 expression (e.g., the ability to knock down at least 70 percent, at least 75 percent, at least 80 percent, at least 85 percent, at least 90 percent, at least 95 percent, at least 98 percent, or at least 99 percent of PKP2 expression at the mRNA and/or protein level) can be selected. The selected construct can be packaged in a virus particle (e.g., an AAV particle) and delivered to a mammal identified as having a pathogenic mutation in the PKP2 gene at a dose of, for example, about 10¹⁰ vg/kg to about 10¹⁵ vg/kg, or about 10¹⁰ AAV particles/mL to about 10¹⁵ AAV particles/mL, using any appropriate route of administration (e.g., via direct injection into a tissue such as the myocardium, or via intraperitoneal administration, intranasal administration, intravenous administration, intrathecal administration, intracerebral administration, intraparenchymal administration, or oral delivery in nanoparticles and/or drug tablets, capsules, or pills). In some cases, a SupRep construct targeted to PKP2 can be administered to a mammal in a non-viral vector (e.g., in a plasmid or in a nucleic acid molecule complexed with lipids, polymers, or nanospheres), and can be delivered by direct injection to a tissue (e.g., the myocardium), or by intraperitoneal, intranasal, intravenous, intrathecal, intracerebral, or intraparenchymal administration, or by oral delivery. After administration, the mammal can be monitored for symptoms of ACM, to determine whether one or more symptoms of the disorder are diminished. For example, effective SupRep treatment of a mammal having ACM associated with a pathogenic mutation in PKP2 can result in a reduction in symptoms such as fibrofatty replacement of the myocardium, ventricular arrhythmias, syncope, sustained VT or VF, and/or heart failure. In some cases, effective SupRep treatment of a mammal having ACM associated with a pathogenic PKP2 mutation can result in reduction in LV inflammation, fibrosis, and/or systolic dysfunction.

[0182] In another embodiment, a mammal having ACM associated with a pathogenic mutation in the DSG2 gene can be identified by, for example, analyzing a biological sample (e.g., analyzing a blood sample using PCR and/or DNA sequencing methods) obtained from the mammal to determine whether DNA in the sample includes a pathogenic mutation in the DSG2 gene. Pathogenic mutations in or encoded by the DSG2gene include, without limitation, c.378+1G>T (p.mutant splice product), c.560A>G (p.D187G), c.146 G>A (p.R49H), c.560 A>G (p.D187G), c.1520 G>A (p.C507Y), c.1003A>G (p.T335A), and c.961 T>A (p.F3211), as well as mutations resulting in p.K294E, p.D154E, p.V3921, p.L772X, and p.R773K. See, also, Brodehl et al., Int J Mol Sci. 2021, 22(7):3786; Debus et al., J Mol Cell Cardiol. 2019, 129:303-313; and Xu et al., J Am Coll Cardiol. 2010, 55(6):587-597. SupRep constructs targeted to mutant DSG2 alleles can be designed to suppress the mutant DSG2 alleles and replace them with a wild type DSG2 allele. SupRep constructs targeted to mutant DSG2 alleles can be designed and prepared using methods described, for example, in the Examples herein. For example, a SupRep construct can be generated to target a DSG2 allele containing a pathogenic mutation, either by targeting a region of a disease-associated DSG2 allele that contains a pathogenic mutation, or by targeting a region of a disease-associated DSG2 allele that does not contain a pathogenic mutation. The SupRep constructs can be tested for their ability to suppress a mutant DSG2 allele and replace it with a wild type DSG2 allele. For example, constructs can be tested in an in vitro model system by co-transfecting cultured cells with a wild type DSG2 construct and a shDSG2 construct, and measuring DSG2 expression with qRT-PCR and/or western blotting. A construct having a relatively high ability to knock down DSG2 expression (e.g., the ability to knock down at least 70 percent, at least 75 percent, at least 80 percent, at least 85 percent, at least 90 percent, at least 95 percent, at least 98 percent, or at least 99 percent of DSG2 expression at the mRNA and/or protein level) can be selected. The selected construct can be packaged in a virus particle (e.g., an AAV particle) and delivered to a mammal identified as having a pathogenic mutation in the DSG2 gene at a dose of, for example, about 10¹⁰ vg/kg to about 10¹⁵ vg/kg, or about 10¹⁰ AAV particles/mL to about 10¹⁵ AAV particles/mL, using any appropriate route of administration (e.g., via direct injection into a tissue such as the myocardium, or via intraperitoneal administration, intranasal administration, intravenous administration, intrathecal administration, intracerebral administration, intraparenchymal administration, or oral delivery in nanoparticles and/or drug tablets, capsules, or pills). In some cases, a SupRep construct targeted to DSG2 can be administered to a mammal in a non-viral vector (e.g., in a plasmid or in a nucleic acid molecule complexed with lipids, polymers, or nanospheres), and can be delivered by direct injection to a tissue (e.g., the myocardium), or by intraperitoneal, intranasal, intravenous, intrathecal, intracerebral, or intraparenchymal administration, or by oral delivery. After administration, the mammal can be monitored for symptoms of ACM, to determine whether one or more symptoms of the disorder are diminished. For example, effective SupRep treatment of a mammal having ACM associated with a pathogenic mutation in DSG2 can result in a reduction in symptoms such as fibrofatty replacement of the myocardium, ventricular arrhythmias, syncope, sustained VT or VF, and/or heart failure. In some cases, effective SupRep treatment of a mammal having ACM associated with a pathogenic DSG2 mutation can result in reduction in LV inflammation, fibrosis, and/or systolic dysfunction.

[0183] In another embodiment, a mammal having ACM, DCM, LVNC, or skeletal myopathy associated with a pathogenic mutation in the DES gene can be identified by, for example, analyzing a biological sample (e.g., analyzing a blood sample using PCR and/or DNA sequencing methods) obtained from the mammal to determine whether DNA in the sample includes a pathogenic mutation in the DES gene. Pathogenic mutations in or encoded by the DES gene include, without limitation, c.407C>T (p.L136P), c.1009G>C (p.A337P), c.1013T>G (p.L338R), c.1195G>T (p.D399Y), and c.1201G>A (p.E401K). See, also, Brodehl et al., J Mol Cell Cardiol. 2016, 91:207-214; Goudeau et al., Hum Mutat. 2006, 27(9):906-913; references. SupRep constructs targeted to mutant DES alleles can be designed to suppress the mutant DES alleles and replace them with a wild type DES allele. SupRep constructs targeted to mutant DES alleles can be designed and prepared using methods described, for example, in the Examples herein. For example, a SupRep construct can be generated to target a DES allele containing a pathogenic mutation, either by targeting a region of a disease-associated DES allele that contains a pathogenic mutation, or by targeting a region of a disease-associated DES allele that does not contain a pathogenic mutation. The SupRep constructs can be tested for their ability to suppress a mutant DES allele and replace it with a wild type DES allele. For example, constructs can be tested in an in vitro model system by co-transfecting cultured cells with a wild type DES construct and a shDES construct, and measuring DES expression with qRT-PCR and/or western blotting. A construct having a relatively high ability to knock down DES expression (e.g., the ability to knock down at least 70 percent, at least 75 percent, at least 80 percent, at least 85 percent, at least 90 percent, at least 95 percent, at least 98 percent, or at least 99 percent of DES expression at the mRNA and/or protein level) can be selected. The selected construct can be packaged in a virus particle (e.g., an AAV particle) and delivered to a mammal identified as having a pathogenic mutation in the DES gene at a dose of, for example, about 10¹⁰ vg/kg to about 10¹⁵ vg/kg, or about 10¹⁰ AAV particles/mL to about 10¹⁵ AAV particles/mL, using any appropriate route of administration (e.g., via direct injection into a tissue such as the myocardium, or via intraperitoneal administration, intranasal administration, intravenous administration, intrathecal administration, intracerebral administration, intraparenchymal administration, or oral delivery in nanoparticles and/or drug tablets, capsules, or pills). In some cases, a SupRep construct targeted to DES can be administered to a mammal in a non-viral vector (e.g., in a plasmid or in a nucleic acid molecule complexed with lipids, polymers, or nanospheres), and can be delivered by direct injection to a tissue (e.g., the myocardium), or by intraperitoneal, intranasal, intravenous, intrathecal, intracerebral, or intraparenchymal administration, or by oral delivery. After administration, the mammal can be monitored for symptoms of ACM, DCM, LVNC, or skeletal myopathy, to determine whether one or more symptoms of the disorder are diminished. For example, effective SupRep treatment of a mammal having ACM, DCM, LVNC, or skeletal myopathy associated with a pathogenic mutation in DES can result in a reduction in symptoms such as fibrofatty replacement of the myocardium, ventricular arrhythmias, fainting, sustained VT or VF, dyspnea, fatigue, edema of the legs and/or ankles, chest pain, lightheadedness, heart palpitations, and/or heart failure. In some cases, effective SupRep treatment of a mammal having ACM, DCM, LVNC, or skeletal myopathy associated with a pathogenic DES mutation can result in reduction in LV inflammation, fibrosis, systolic dysfunction, and/or endomyocardial trabeculations, as well as normalization of LV size, and/or strengthening of the LV.

[0184] In another embodiment, a mammal having ATS (also referred to as LQT7) or CPVT associated with a pathogenic mutation in the KCNJ2 gene can be identified by, for example, analyzing a biological sample (e.g., analyzing a blood sample using PCR and/or DNA sequencing methods) obtained from the mammal to determine whether DNA in the sample includes a pathogenic mutation in the KCNJ2 gene. Pathogenic mutations in or encoded by the KCNJ2 gene include, without limitation, c.199C>T (p.R67W), c.271_282del12 (p.A91 L94del), c.653G>A (p.R218Q), c.953A>G (p.N318S), c.966G>C (p.W322C), and c.1244C>T (p.P415L). See, also, Limberg et al., Basic Res Cardiol. 2013, 108:353; Andelfinger et al., Am J Hum Genet. 2002, 71(3):663-668; and Tristani-Firouzi et al., J Clin Invest. 2002, 110(3):381-388. SupRep constructs targeted to mutant KCNJ2 alleles can be designed to suppress the mutant KCNJ2 alleles and replace them with a wild type KCNJ2 allele. SupRep constructs targeted to mutant KCNJ2 alleles can be designed and prepared using methods described, for example, in the Examples herein. For example, a SupRep construct can be generated to target a KCNJ2 allele containing a pathogenic mutation, either by targeting a region of a disease-associated KCNJ2 allele that contains a pathogenic mutation, or by targeting a region of a disease-associated KCNJ2 allele that does not contain a pathogenic mutation. The SupRep constructs can be tested for their ability to suppress a mutant KCNJ2 allele and replace it with a wild type KCNJ2 allele. For example, constructs can be tested in an in vitro model system by co-transfecting cultured cells with a wild type KCNJ2 construct and a shKCNJ2 construct, and measuring KCNJ2 expression with qRT-PCR and/or western blotting. A construct having a relatively high ability to knock down KCNJ2 expression (e.g., the ability to knock down at least 70 percent, at least 75 percent, at least 80 percent, at least 85 percent, at least 90 percent, at least 95 percent, at least 98 percent, or at least 99 percent of KCNJ2 expression at the mRNA and/or protein level) can be selected. The selected construct can be packaged in a virus particle (e.g., an AAV particle) and delivered to a mammal identified as having a pathogenic mutation in the KCNJ2 gene at a dose of, for example, about 10¹⁰ vg/kg to about 10¹⁵ vg/kg, or about 10¹⁰ AAV particles/mL to about 10¹⁵ AAV particles/mL, using any appropriate route of administration (e.g., via direct injection into a tissue such as the myocardium, or via intraperitoneal administration, intranasal administration, intravenous administration, intrathecal administration, intracerebral administration, intraparenchymal administration, or oral delivery in nanoparticles and/or drug tablets, capsules, or pills). In some cases, a SupRep construct targeted to KCNJ2 can be administered to a mammal in a non-viral vector (e.g., in a plasmid or in a nucleic acid molecule complexed with lipids, polymers, or nanospheres), and can be delivered by direct injection to a tissue (e.g., the myocardium), or by intraperitoneal, intranasal, intravenous, intrathecal, intracerebral, or intraparenchymal administration, or by oral delivery. After administration, the mammal can be monitored for symptoms of ATS or CPVT, to determine whether one or more symptoms of the disorder are diminished. For example, effective SupRep treatment of a mammal having ATS or CPVT associated with a pathogenic mutation in KCNJ2 can result in a reduction in symptoms such as muscle weakness, fainting, lightheadedness, dizziness, periodic paralysis, and/or arrhythmia (e.g., VT). In some cases, effective SupRep treatment of a mammal having ATS or CPVT associated with a pathogenic KCNJ2 mutation can result in normalization and/or regulation of the heart rhythm.

[0185] In another embodiment, a mammal having CPVT associated with a pathogenic mutation in the CASQ2 gene can be identified by, for example, analyzing a biological sample (e.g., analyzing a blood sample using PCR and/or DNA sequencing methods) obtained from the mammal to determine whether DNA in the sample includes a pathogenic mutation in the CASQ2 gene. Pathogenic mutations in or encoded by the CASQ2 gene include, without limitation, c.62delA (p.E21Gfs*15), c.97C>T (p.R33*), c.98G>A (p.R33Q), c.115G>T (p.E39*), c.115G>A (p.E39K), c.158G>T (p.C53F), c.164A>G (p.Y55C), c.199C>T (p.Q67*), c.204delA (p.K68Nfs*5), c.213delA (p.Q71Hfs*2), c.230T>C (p.L77P), c.234+2T>C (p.mutant splice site), c.259A>T (p.K87*), c.339-354del (p.S113Rfs*6), c.500T>A (p.L167H), c.518G>T (p.S173I), c.532+1G>A (p. mutant splice site), c.539A>G (p.K180R), c.545T>C (p.F182S), c.546delT (p.F182Lfs*28), c.572C>T (p.P191L), c.603delA (p.V203Lfs*7), c.618A>C (p.K206N), and c.691C>T (p.P231S). See, also, Ng et al., Circulation. 2020, 142(10):932-947; and Gray et al., Heart Rhythm. 2016, 13(8):1652-1660. SupRep constructs targeted to mutant CASQ2 alleles can be designed to suppress the mutant CASQ2 alleles and replace them with a wild type CASQ2 allele. SupRep constructs targeted to mutant CASQ2 alleles can be designed and prepared using methods described, for example, in the Examples herein. For example, a SupRep construct can be generated to target a CASQ2 allele containing a pathogenic mutation, either by targeting a region of a disease-associated CASQ2 allele that contains a pathogenic mutation, or by targeting a region of a disease-associated CASQ2 allele that does not contain a pathogenic mutation. The SupRep constructs can be tested for their ability to suppress a mutant CASQ2 allele and replace it with a wild type CASQ2 allele. For example, constructs can be tested in an in vitro model system by co-transfecting cultured cells with a wild type CASQ2 construct and a shCASQ2 construct, and measuring CASQ2 expression with qRT-PCR and/or western blotting. A construct having a relatively high ability to knock down CASQ2 expression (e.g., the ability to knock down at least 70 percent, at least 75 percent, at least 80 percent, at least 85 percent, at least 90 percent, at least 95 percent, at least 98 percent, or at least 99 percent of CASQ2 expression at the mRNA and/or protein level) can be selected. The selected construct can be packaged in a virus particle (e.g., an AAV particle) and delivered to a mammal identified as having a pathogenic mutation in the CASQ2 gene at a dose of, for example, about 10¹⁰ vg/kg to about 10¹⁵ vg/kg, or about 10¹⁰ AAV particles/mL to about 10¹⁵ AAV particles/mL, using any appropriate route of administration (e.g., via direct injection into a tissue such as the myocardium, or via intraperitoneal administration, intranasal administration, intravenous administration, intrathecal administration, intracerebral administration, intraparenchymal administration, or oral delivery in nanoparticles and/or drug tablets, capsules, or pills). In some cases, a SupRep construct targeted to CASQ2 can be administered to a mammal in a non-viral vector (e.g., in a plasmid or in a nucleic acid molecule complexed with lipids, polymers, or nanospheres), and can be delivered by direct injection to a tissue (e.g., the myocardium), or by intraperitoneal, intranasal, intravenous, intrathecal, intracerebral, or intraparenchymal administration, or by oral delivery. After administration, the mammal can be monitored for symptoms of CPVT, to determine whether one or more symptoms of the disorder are diminished. For example, effective SupRep treatment of a mammal having CPVT associated with a pathogenic mutation in CASQ2 can result in a reduction in symptoms such as dizziness, lightheadedness, fainting, and/or VT. In some cases, effective SupRep treatment of a mammal having CPVT associated with a pathogenic CASQ2 mutation can result in normalization and/or regulation of the heart rhythm.

[0186] In another embodiment, a mammal having DCM associated with a pathogenic mutation in the LMNA gene can be identified by, for example, analyzing a biological sample (e.g., analyzing a blood sample using PCR and/or DNA sequencing methods) obtained from the mammal to determine whether DNA in the sample includes a pathogenic mutation in the LMNA gene. Pathogenic mutations in or encoded by the LMNA gene include, without limitation, c.481G>A (p.E161K), c.1130G>A (p.R377H), c.1621C>T (p.R541C), c.1621C>G (p.R541G), c.266G>T (p.R89L), c.736C>T (p.Q246*), c.1197_1240del44 (p.G400Rfs*11), c.1292C>G (p.S431*), 1526_1527insC (p.T510Yfs*42), c.1443C>G (p.Y481*), and c.767 T>G (p.V256G). See, also, Saj et al., BMC Med Genet. 2013, 14:55; Sebillon et al., J Med Genet. 2003, 40:560-567; and Parks et al., Am Heart J. 2008, 156(1):161-169. SupRep constructs targeted to mutant LMNA alleles can be designed to suppress the mutant LMNA alleles and replace them with a wild type LMNA allele. SupRep constructs targeted to mutant LMNA alleles can be designed and prepared using methods described, for example, in the Examples herein. For example, a SupRep construct can be generated to target a LMNA allele containing a pathogenic mutation, either by targeting a region of a disease-associated LMNA allele that contains a pathogenic mutation, or by targeting a region of a disease-associated LMNA allele that does not contain a pathogenic mutation. The SupRep constructs can be tested for their ability to suppress a mutant LMNA allele and replace it with a wild type LMNA allele. For example, constructs can be tested in an in vitro model system by co-transfecting cultured cells with a wild type LMNA construct and a shLMNA construct, and measuring LMNA expression with qRT-PCR and/or western blotting. A construct having a relatively high ability to knock down LMNA expression (e.g., the ability to knock down at least 70 percent, at least 75 percent, at least 80 percent, at least 85 percent, at least 90 percent, at least 95 percent, at least 98 percent, or at least 99 percent of LMNA expression at the mRNA and/or protein level) can be selected. The selected construct can be packaged in a virus particle (e.g., an AAV particle) and delivered to a mammal identified as having a pathogenic mutation in the LMNA gene at a dose of, for example, about 10¹⁰ vg/kg to about 10¹⁵ vg/kg, or about 10¹⁰ AAV particles/mL to about 10¹⁵ AAV particles/mL, using any appropriate route of administration (e.g., via direct injection into a tissue such as the myocardium, or via intraperitoneal administration, intranasal administration, intravenous administration, intrathecal administration, intracerebral administration, intraparenchymal administration, or oral delivery in nanoparticles and/or drug tablets, capsules, or pills). In some cases, a SupRep construct targeted to LMNA can be administered to a mammal in a non-viral vector (e.g., in a plasmid or in a nucleic acid molecule complexed with lipids, polymers, or nanospheres), and can be delivered by direct injection to a tissue (e.g., the myocardium), or by intraperitoneal, intranasal, intravenous, intrathecal, intracerebral, or intraparenchymal administration, or by oral delivery. After administration, the mammal can be monitored for symptoms of DCM, to determine whether one or more symptoms of the disorder are diminished. For example, effective SupRep treatment of a mammal having DCM associated with a pathogenic mutation in LMNA can result in a reduction in symptoms such as dyspnea, fatigue, edema of the legs and/or ankles, chest pain, arrhythmia, fainting, lightheadedness, and/or heart palpitations. In some cases, effective SupRep treatment of a mammal having DCM associated with a pathogenic LMNA mutation can result in normalization of LV size and/or strengthening of the LV.

[0187] In another embodiment, a mammal having DCM associated with a pathogenic mutation in the TPM1 gene can be identified by, for example, analyzing a biological sample (e.g., analyzing a blood sample using PCR and/or DNA sequencing methods) obtained from the mammal to determine whether DNA in the sample includes a pathogenic mutation in the TPM1 gene. Pathogenic mutations in or encoded by the TPM1 gene include, without limitation, c.688G>A (p. D230N), c.688G>A (p.D230N), c.23T>G (p.M8R), c.632C>G (p.A211G), c.725C>T (p.A242V), c.163G>A (p.D55N), c.337C>G (p.L113V), c.341A>G (p.E114G), c.275T>C (p.I92T), c.423G>C (p.M141I), and c.416A>T (p.E139V). See, also, Pugh et al., Genet Med. 2014, 16:601-608; and McNally and Mestroni, Circ Res. 2017, 121:731-748. SupRep constructs targeted to mutant TPM1 alleles can be designed to suppress the mutant TPM1 alleles and replace them with a wild type TPM1 allele. SupRep constructs targeted to mutant TPM1 alleles can be designed and prepared using methods described, for example, in the Examples herein. For example, a SupRep construct can be generated to target a TPM1 allele containing a pathogenic mutation, either by targeting a region of a disease-associated TPM1 allele that contains a pathogenic mutation, or by targeting a region of a disease-associated TPM1 allele that does not contain a pathogenic mutation. The SupRep constructs can be tested for their ability to suppress a mutant TPM1 allele and replace it with a wild type TPM1 allele. For example, constructs can be tested in an in vitro model system by co-transfecting cultured cells with a wild type TPM1 construct and a shTPM1 construct, and measuring TPM1 expression with qRT-PCR and/or western blotting. A construct having a relatively high ability to knock down TPM1 expression (e.g., the ability to knock down at least 70 percent, at least 75 percent, at least 80 percent, at least 85 percent, at least 90 percent, at least 95 percent, at least 98 percent, or at least 99 percent of TPM1 expression at the mRNA and/or protein level) can be selected. The selected construct can be packaged in a virus particle (e.g., an AAV particle) and delivered to a mammal identified as having a pathogenic mutation in the TPM1 gene at a dose of, for example, about 10¹⁰ vg/kg to about 10¹⁵ vg/kg, or about 10¹⁰ AAV particles/mL to about 10¹⁵ AAV particles/mL, using any appropriate route of administration (e.g., via direct injection into a tissue such as the myocardium, or via intraperitoneal administration, intranasal administration, intravenous administration, intrathecal administration, intracerebral administration, intraparenchymal administration, or oral delivery in nanoparticles and/or drug tablets, capsules, or pills). In some cases, a SupRep construct targeted to TPM1 can be administered to a mammal in a non-viral vector (e.g., in a plasmid or in a nucleic acid molecule complexed with lipids, polymers, or nanospheres), and can be delivered by direct injection to a tissue (e.g., the myocardium), or by intraperitoneal, intranasal, intravenous, intrathecal, intracerebral, or intraparenchymal administration, or by oral delivery. After administration, the mammal can be monitored for symptoms of DCM, to determine whether one or more symptoms of the disorder are diminished. For example, effective SupRep treatment of a mammal having DCM associated with a pathogenic mutation in TPM1 can result in a reduction in symptoms such as dyspnea, fatigue, edema of the legs and/or ankles, chest pain, arrhythmia, fainting, lightheadedness, and/or heart palpitations. In some cases, effective SupRep treatment of a mammal having DCM associated with a pathogenic TPM1 mutation can result in normalization of LV size and/or strengthening of the LV.

[0188] In another embodiment, a mammal having DCM or ACM associated with a pathogenic mutation in the PLN gene can be identified by, for example, analyzing a biological sample (e.g., analyzing a blood sample using PCR and/or DNA sequencing methods) obtained from the mammal to determine whether DNA in the sample includes a pathogenic mutation in the PLN gene. Pathogenic mutations in or encoded by the PLN gene include, without limitation, c.40_42delAGA (p.R14del), c.116T>G (p.L39X), and c.25C>T (p.R9C). See, also, to Rijdt et al., Cardiovasc Pathol. 2019, 40:2-6; Groeneweg et al., Am J Cardiol. 2013, 112:1197-1206; Fish et al., Sci Rep. 2016, 22235; and Haghighi et al., J Clin Invest. 2003, 111(6):869-876. SupRep constructs targeted to mutant PLN alleles can be designed to suppress the mutant PLN alleles and replace them with a wild type PLN allele. SupRep constructs targeted to mutant PLN alleles can be designed and prepared using methods described, for example, in the Examples herein. For example, a SupRep construct can be generated to target a PLN allele containing a pathogenic mutation, either by targeting a region of a disease-associated PLN allele that contains a pathogenic mutation, or by targeting a region of a disease-associated PLN allele that does not contain a pathogenic mutation. The SupRep constructs can be tested for their ability to suppress a mutant PLN allele and replace it with a wild type PLN allele. For example, constructs can be tested in an in vitro model system by co-transfecting cultured cells with a wild type PLN construct and a shPLN construct, and measuring PLN expression with qRT-PCR and/or western blotting. A construct having a relatively high ability to knock down PLN expression (e.g., the ability to knock down at least 70 percent, at least 75 percent, at least 80 percent, at least 85 percent, at least 90 percent, at least 95 percent, at least 98 percent, or at least 99 percent of PLN expression at the mRNA and/or protein level) can be selected. The selected construct can be packaged in a virus particle (e.g., an AAV particle) and delivered to a mammal identified as having a pathogenic mutation in the PLN gene at a dose of, for example, about 10¹⁰ vg/kg to about 10¹⁵ vg/kg, or about 10¹⁰ AAV particles/mL to about 10¹⁵ AAV particles/mL, using any appropriate route of administration (e.g., via direct injection into a tissue such as the myocardium, or via intraperitoneal administration, intranasal administration, intravenous administration, intrathecal administration, intracerebral administration, intraparenchymal administration, or oral delivery in nanoparticles and/or drug tablets, capsules, or pills). In some cases, a SupRep construct targeted to PLN can be administered to a mammal in a non-viral vector (e.g., in a plasmid or in a nucleic acid molecule complexed with lipids, polymers, or nanospheres), and can be delivered by direct injection to a tissue (e.g., the myocardium), or by intraperitoneal, intranasal, intravenous, intrathecal, intracerebral, or intraparenchymal administration, or by oral delivery. After administration, the mammal can be monitored for symptoms of DCM or ACM, to determine whether one or more symptoms of the disorder are diminished. For example, effective SupRep treatment of a mammal having DCM or ACM associated with a pathogenic mutation in PLN can result in a reduction in symptoms such as dyspnea, fatigue, edema of the legs and/or ankles, chest pain, arrhythmia, fainting, lightheadedness, heart palpitations, fibrofatty replacement of the myocardium, sustained VT or VF, and/or heart failure. In some cases, effective SupRep treatment of a mammal having DCM or ACM associated with a pathogenic PLN mutation can result in normalization of LV size, strengthening of the LV, reduction in LV inflammation, reduction in fibrosis, and/or reduction in systolic dysfunction.

[0189] In another embodiment, a mammal having FH associated with a pathogenic mutation in the LDLR gene can be identified by, for example, analyzing a biological sample (e.g., analyzing a blood sample using PCR and/or DNA sequencing methods) obtained from the mammal to determine whether DNA in the sample includes a pathogenic mutation in the LDLR gene. Pathogenic mutations in or encoded by the LDLR gene include, without limitation, c.1845+2T>C, c.1012T>A (p.C338S), c.1297G>C (p.D433H), c.1702C>G (p.L568V), and c.2431A>T (p.K811*), c.97C>T (p.Q33X), c.357delG (p.K120fs), c.428G>A (p.C143Y), c.517T>C (p.C173R), c.1448G>A (p.W483X), c.1744C>T (p.L582F), c.1757C>A (p.S586X), and c.1879G>A (p.A627T). See, also, Tada et al., J Clin Lipidol. 2020, 14(3):346-351; Wang et al., J Geriatr Cardiol. 2018, 15(6):434-440; Hori et al., Atherosclerosis. 2019, 289:101-108; and Galicia-Garcia et al., Sci Rep. 2020, 10:1727. SupRep constructs targeted to mutant LDLR alleles can be designed to suppress the mutant LDLR alleles and replace them with a wild type LDLR allele. SupRep constructs targeted to mutant LDLR alleles can be designed and prepared using methods described, for example, in the Examples herein. For example, a SupRep construct can be generated to target a LDLR allele containing a pathogenic mutation, either by targeting a region of a disease-associated LDLR allele that contains a pathogenic mutation, or by targeting a region of a disease-associated LDLR allele that does not contain a pathogenic mutation. The SupRep constructs can be tested for their ability to suppress a mutant LDLR allele and replace it with a wild type LDLR allele. For example, constructs can be tested in an in vitro model system by co-transfecting cultured cells with a wild type LDLR construct and a shLDLR construct, and measuring LDLR expression with qRT-PCR and/or western blotting. A construct having a relatively high ability to knock down LDLR expression (e.g., the ability to knock down at least 70 percent, at least 75 percent, at least 80 percent, at least 85 percent, at least 90 percent, at least 95 percent, at least 98 percent, or at least 99 percent of LDLR expression at the mRNA and/or protein level) can be selected. The selected construct can be packaged in a virus particle (e.g., an AAV particle) and delivered to a mammal identified as having a pathogenic mutation in the LDLR gene at a dose of, for example, about 10¹⁰ vg/kg to about 10¹⁵ vg/kg, or about 10¹⁰ AAV particles/mL to about 10¹⁵ AAV particles/mL, using any appropriate route of administration (e.g., via direct injection into a tissue such as the myocardium, or via intraperitoneal administration, intranasal administration, intravenous administration, intrathecal administration, intracerebral administration, intraparenchymal administration, or oral delivery in nanoparticles and/or drug tablets, capsules, or pills). In some cases, a SupRep construct targeted to LDLR can be administered to a mammal in a non-viral vector (e.g., in a plasmid or in a nucleic acid molecule complexed with lipids, polymers, or nanospheres), and can be delivered by direct injection to a tissue (e.g., the myocardium), or by intraperitoneal, intranasal, intravenous, intrathecal, intracerebral, or intraparenchymal administration, or by oral delivery. After administration, the mammal can be monitored for symptoms of FH, to determine whether one or more symptoms of the disorder are diminished. For example, effective SupRep treatment of a mammal having FH associated with a pathogenic mutation in LDLR can result in a reduction in symptoms such as elevated total and LDL cholesterol levels, angina, and/or xanthomas. In some cases, effective SupRep treatment of a mammal having FH associated with a pathogenic LDLR mutation can alleviate cerebrovascular disease and/or peripheral vascular disease associated with the FH.

[0190] In another embodiment, a mammal having FH associated with a pathogenic mutation in the PCSK9 gene can be identified by, for example, analyzing a biological sample (e.g., analyzing a blood sample using PCR and/or DNA sequencing methods) obtained from the mammal to determine whether DNA in the sample includes a pathogenic mutation in the PCSK9 gene. Pathogenic mutations in or encoded by the PCSK9 gene include, without limitation, c.381T>A (p.S127R), c.644G>A (p.R215H), c.646T>C (p.F216L), c.1120G>T (p.D374Y), and c.1486C>T (p.R496W), as well as p.N157K, p.R218S, p.R237W, p.E670G, p.R218S, p.R357H, p.R469W, p.A443T, p.R496W, p.N425S, p.D374H, p.D129G, p.A168E, p.G236S, p.N354I, p.A245T, p.R272Q, p.R272Q, and p.A245T. See, also, Hori et al., supra; Youngblom et al., “Familial Hypercholesterolemia,” 2014 Jan. 2 (Updated 2016 Dec 8), In: Adam et al., eds., GENEREVIEWS® University of Washington, Seattle; and Guo et al., Front Genet. 2020, 11:1020. SupRep constructs targeted to mutant PCSK9 alleles can be designed to suppress the mutant PCSK9 alleles and replace them with a wild type PCSK9 allele. SupRep constructs targeted to mutant PCSK9 alleles can be designed and prepared using methods described, for example, in the Examples herein. For example, a SupRep construct can be generated to target a PCSK9 allele containing a pathogenic mutation, either by targeting a region of a disease-associated PCSK9 allele that contains a pathogenic mutation, or by targeting a region of a disease-associated PCSK9 allele that does not contain a pathogenic mutation. The SupRep constructs can be tested for their ability to suppress a mutant PCSK9 allele and replace it with a wild type PCSK9 allele. For example, constructs can be tested in an in vitro model system by co-transfecting cultured cells with a wild type PCSK9 construct and a shPCSK9 construct, and measuring PCSK9 expression with qRT-PCR and/or western blotting. A construct having a relatively high ability to knock down PCSK9 expression (e.g., the ability to knock down at least 70 percent, at least 75 percent, at least 80 percent, at least 85 percent, at least 90 percent, at least 95 percent, at least 98 percent, or at least 99 percent of PCSK9 expression at the mRNA and/or protein level) can be selected. The selected construct can be packaged in a virus particle (e.g., an AAV particle) and delivered to a mammal identified as having a pathogenic mutation in the PCSK9 gene at a dose of, for example, about 10¹⁰ vg/kg to about 10¹⁵ vg/kg, or about 10¹⁰ AAV particles/mL to about 10¹⁵ AAV particles/mL, using any appropriate route of administration (e.g., via direct injection into a tissue such as the myocardium, or via intraperitoneal administration, intranasal administration, intravenous administration, intrathecal administration, intracerebral administration, intraparenchymal administration, or oral delivery in nanoparticles and/or drug tablets, capsules, or pills). In some cases, a SupRep construct targeted to PCSK9 can be administered to a mammal in a non-viral vector (e.g., in a plasmid or in a nucleic acid molecule complexed with lipids, polymers, or nanospheres), and can be delivered by direct injection to a tissue (e.g., the myocardium), or by intraperitoneal, intranasal, intravenous, intrathecal, intracerebral, or intraparenchymal administration, or by oral delivery. After administration, the mammal can be monitored for symptoms of FH, to determine whether one or more symptoms of the disorder are diminished. For example, effective SupRep treatment of a mammal having FH associated with a pathogenic mutation in PCSK9 can result in a reduction in symptoms such as elevated total and LDL cholesterol levels, angina, and/or xanthomas. In some cases, effective SupRep treatment of a mammal having FH associated with a pathogenic PCSK9 mutation can alleviate cerebrovascular disease and/or peripheral vascular disease associated with the FH.

[0191] In another embodiment, a mammal having HCM or DCM associated with a pathogenic mutation in the TNNT2 gene can be identified by, for example, analyzing a biological sample (e.g., analyzing a blood sample using PCR and/or DNA sequencing methods) obtained from the mammal to determine whether DNA in the sample includes a pathogenic mutation in the TNNT2 gene. Pathogenic mutations in or encoded by the TNNT2 gene include, without limitation, c.421C>T (p.R141W), and c.835C>T (p.Q279X), as well as p.P80S, p.D86A, p.R92L, p.K97N, p.K124N, p.R130C, p.R134G, and p.R144W. See, also, Long et al., J Am Heart Assoc. 2015, 4(12):e002443; Gao et al., Medicine. 2020, 99(34):e21843; Millat et al., supra; and Hershberger et al., Circ Cardiovasc Genet. 2009, 2:306-313. SupRep constructs targeted to mutant TNNT2 alleles can be designed to suppress the mutant TNNT2 alleles and replace them with a wild type TNNT2 allele. SupRep constructs targeted to mutant TNNT2 alleles can be designed and prepared using methods described, for example, in the Examples herein. For example, a SupRep construct can be generated to target a TNNT2 allele containing a pathogenic mutation, either by targeting a region of a disease-associated TNNT2 allele that contains a pathogenic mutation, or by targeting a region of a disease-associated TNNT2 allele that does not contain a pathogenic mutation. The SupRep constructs can be tested for their ability to suppress a mutant TNNT2 allele and replace it with a wild type TNNT2 allele. For example, constructs can be tested in an in vitro model system by co-transfecting cultured cells with a wild type TNNT2 construct and a shTNNT2 construct, and measuring TNNT2 expression with qRT-PCR and/or western blotting. A construct having a relatively high ability to knock down TNNT2 expression (e.g., the ability to knock down at least 70 percent, at least 75 percent, at least 80 percent, at least 85 percent, at least 90 percent, at least 95 percent, at least 98 percent, or at least 99 percent of TNNT2 expression at the mRNA and/or protein level) can be selected. The selected construct can be packaged in a virus particle (e.g., an AAV particle) and delivered to a mammal identified as having a pathogenic mutation in the TNNT2 gene at a dose of, for example, about 10¹⁰ vg/kg to about 10¹⁵ vg/kg, or about 10¹⁰ AAV particles/mL to about 10¹⁵ AAV particles/mL, using any appropriate route of administration (e.g., via direct injection into a tissue such as the myocardium, or via intraperitoneal administration, intranasal administration, intravenous administration, intrathecal administration, intracerebral administration, intraparenchymal administration, or oral delivery in nanoparticles and/or drug tablets, capsules, or pills). In some cases, a SupRep construct targeted to TNNT2 can be administered to a mammal in a non-viral vector (e.g., in a plasmid or in a nucleic acid molecule complexed with lipids, polymers, or nanospheres), and can be delivered by direct injection to a tissue (e.g., the myocardium), or by intraperitoneal, intranasal, intravenous, intrathecal, intracerebral, or intraparenchymal administration, or by oral delivery. After administration, the mammal can be monitored for symptoms of HCM or DCM, to determine whether one or more symptoms of the disorder are diminished. For example, effective SupRep treatment of a mammal having HCM or DCM associated with a pathogenic mutation in TNNT2 can result in a reduction in symptoms such as dyspnea, rapid heartbeat, chest pain, fainting, dizziness, fatigue, edema of the legs and/or ankles, arrhythmia, lightheadedness, and/or heart palpitations. In some cases, effective SupRep treatment of a mammal having HCM or DCM associated with a pathogenic TNNT2 mutation can result in reduced contractility, improved relaxation, reduced energy consumption, normalization of LV size, and/or strengthening of the LV.

[0192] In another embodiment, a mammal having LQTS or CPVT associated with a pathogenic mutation in the CALM1 gene can be identified by, for example, analyzing a biological sample (e.g., analyzing a blood sample using PCR and/or DNA sequencing methods) obtained from the mammal to determine whether DNA in the sample includes a pathogenic mutation in the CALM1 gene. Pathogenic mutations in or encoded by the CALM1 gene include, without limitation, p.N541, p.F90L, p.N98S, p.E105A, p.D130G, p.D132V, p.E141G, and p.F142L. See, also, Jensen et al., Front Mol Neurosci. 2018, 11:396; and Boczek et al., Circ Cardiovasc Genet. 2016, 9:136-146. SupRep constructs targeted to mutant CALM1 alleles can be designed to suppress the mutant CALM1 alleles and replace them with a wild type CALM1 allele. SupRep constructs targeted to mutant CALM1 alleles can be designed and prepared using methods described, for example, in the Examples herein. For example, a SupRep construct can be generated to target a CALM1 allele containing a pathogenic mutation, either by targeting a region of a disease-associated CALM1 allele that contains a pathogenic mutation, or by targeting a region of a disease-associated CALM1 allele that does not contain a pathogenic mutation. The SupRep constructs can be tested for their ability to suppress a mutant CALM1 allele and replace it with a wild type CALM1 allele. For example, constructs can be tested in an in vitro model system by co-transfecting cultured cells with a wild type CALM1 construct and a shgene construct, and measuring CALM1 expression with qRT-PCR and/or western blotting. A construct having a relatively high ability to knock down CALM1 expression (e.g., the ability to knock down at least 70 percent, at least 75 percent, at least 80 percent, at least 85 percent, at least 90 percent, at least 95 percent, at least 98 percent, or at least 99 percent of CALM1 expression at the mRNA and/or protein level) can be selected. The selected construct can be packaged in a virus particle (e.g., an AAV particle) and delivered to a mammal identified as having a pathogenic mutation in the CALM1 gene at a dose of, for example, about 10¹⁰ vg/kg to about 10¹⁵ vg/kg, or about 10¹⁰ AAV particles/mL to about 10¹⁵ AAV particles/mL, using any appropriate route of administration (e.g., via direct injection into a tissue such as the myocardium, or via intraperitoneal administration, intranasal administration, intravenous administration, intrathecal administration, intracerebral administration, intraparenchymal administration, or oral delivery in nanoparticles and/or drug tablets, capsules, or pills). In some cases, a SupRep construct targeted to CALM1 can be administered to a mammal in a non-viral vector (e.g., in a plasmid or in a nucleic acid molecule complexed with lipids, polymers, or nanospheres), and can be delivered by direct injection to a tissue (e.g., the myocardium), or by intraperitoneal, intranasal, intravenous, intrathecal, intracerebral, or intraparenchymal administration, or by oral delivery. After administration, the mammal can be monitored for symptoms of LQTS or CPVT, to determine whether one or more symptoms of the disorder are diminished. For example, effective SupRep treatment of a mammal having LQTS or CPVT associated with a pathogenic mutation in CALM1 can result in a reduction in symptoms such as rapid heartbeat, fainting, seizures, dizziness, lightheadedness, and/or VT. In some cases, effective SupRep treatment of a mammal having LQTS or CPVT associated with a pathogenic CALM1 mutation can result in an normalization of I_{Ks} current density, normalization of cardiac APD, and/or regulation of heart rhythm.

[0193] In another embodiment, a mammal having LQTS or CPVT associated with a pathogenic mutation in the CALM2 gene can be identified by, for example, analyzing a biological sample (e.g., analyzing a blood sample using PCR and/or DNA sequencing methods) obtained from the mammal to determine whether DNA in the sample includes a pathogenic mutation in the CALM2 gene. Pathogenic mutations in or encoded by the CALM2 gene include, without limitation, p.D96V, p.N98I, p.N98S, p.D130G, p.D130V, p.E132E, p.D132H, p.D134H, and p.Q136P. See, also, Jensen et al., supra; and Boczek et al. supra. SupRep constructs targeted to mutant CALM2 alleles can be designed to suppress the mutant CALM2 alleles and replace them with a wild type CALM2 allele. SupRep constructs targeted to mutant CALM2 alleles can be designed and prepared using methods described, for example, in the Examples herein. For example, a SupRep construct can be generated to target a CALM2 allele containing a pathogenic mutation, either by targeting a region of a disease-associated CALM2 allele that contains a pathogenic mutation, or by targeting a region of a disease-associated CALM2 allele that does not contain a pathogenic mutation. The SupRep constructs can be tested for their ability to suppress a mutant CALM2 allele and replace it with a wild type CALM2 allele. For example, constructs can be tested in an in vitro model system by co-transfecting cultured cells with a wild type CALM2 construct and a shgene construct, and measuring CALM2 expression with qRT-PCR and/or western blotting. A construct having a relatively high ability to knock down CALM2 expression (e.g., the ability to knock down at least 70 percent, at least 75 percent, at least 80 percent, at least 85 percent, at least 90 percent, at least 95 percent, at least 98 percent, or at least 99 percent of CALM2 expression at the mRNA and/or protein level) can be selected. The selected construct can be packaged in a virus particle (e.g., an AAV particle) and delivered to a mammal identified as having a pathogenic mutation in the CALM2 gene at a dose of, for example, about 10¹⁰ vg/kg to about 10¹⁵ vg/kg, or about 10¹⁰ AAV particles/mL to about 10¹⁵ AAV particles/mL, using any appropriate route of administration (e.g., via direct injection into a tissue such as the myocardium, or via intraperitoneal administration, intranasal administration, intravenous administration, intrathecal administration, intracerebral administration, intraparenchymal administration, or oral delivery in nanoparticles and/or drug tablets, capsules, or pills). In some cases, a SupRep construct targeted to CALM2 can be administered to a mammal in a non-viral vector (e.g., in a plasmid or in a nucleic acid molecule complexed with lipids, polymers, or nanospheres), and can be delivered by direct injection to a tissue (e.g., the myocardium), or by intraperitoneal, intranasal, intravenous, intrathecal, intracerebral, or intraparenchymal administration, or by oral delivery. After administration, the mammal can be monitored for symptoms of LQTS or CPVT, to determine whether one or more symptoms of the disorder are diminished. For example, effective SupRep treatment of a mammal having LQTS or CPVT associated with a pathogenic mutation in CALM2 can result in a reduction in symptoms such as rapid heartbeat, fainting, seizures, dizziness, lightheadedness, and/or VT. In some cases, effective SupRep treatment of a mammal having LQTS or CPVT associated with a pathogenic CALM2 mutation can result in an normalization of I_{Ks} current density, normalization of cardiac APD, and/or regulation of heart rhythm.

[0194] In another embodiment, a mammal having LQTS or CPVT associated with a pathogenic mutation in the CALM3 gene can be identified by, for example, analyzing a biological sample (e.g., analyzing a blood sample using PCR and/or DNA sequencing methods) obtained from the mammal to determine whether DNA in the sample includes a pathogenic mutation in the CALM3 gene. Pathogenic mutations in or encoded by the CALM3 gene include, without limitation, p.D96H, p.A103V, p.D130G, and p.F142L. See, also, Jensen et al., supra; and Boczek et al. supra. SupRep constructs targeted to mutant CALM3 alleles can be designed to suppress the mutant CALM3 alleles and replace them with a wild type CALM3 allele. SupRep constructs targeted to mutant CALM3 alleles can be designed and prepared using methods described, for example, in the Examples herein. For example, a SupRep construct can be generated to target a CALM3 allele containing a pathogenic mutation, either by targeting a region of a disease-associated CALM3 allele that contains a pathogenic mutation, or by targeting a region of a disease-associated CALM3 allele that does not contain a pathogenic mutation. The SupRep constructs can be tested for their ability to suppress a mutant CALM3 allele and replace it with a wild type CALM3 allele. For example, constructs can be tested in an in vitro model system by co-transfecting cultured cells with a wild type CALM3 construct and a shgene construct, and measuring CALM3 expression with qRT-PCR and/or western blotting. A construct having a relatively high ability to knock down CALM3 expression (e.g., the ability to knock down at least 70 percent, at least 75 percent, at least 80 percent, at least 85 percent, at least 90 percent, at least 95 percent, at least 98 percent, or at least 99 percent of CALM3 expression at the mRNA and/or protein level) can be selected. The selected construct can be packaged in a virus particle (e.g., an AAV particle) and delivered to a mammal identified as having a pathogenic mutation in the CALM3 gene at a dose of, for example, about 10¹⁰ vg/kg to about 10¹⁵ vg/kg, or about 10¹⁰ AAV particles/mL to about 10¹⁵ AAV particles/mL, using any appropriate route of administration (e.g., via direct injection into a tissue such as the myocardium, or via intraperitoneal administration, intranasal administration, intravenous administration, intrathecal administration, intracerebral administration, intraparenchymal administration, or oral delivery in nanoparticles and/or drug tablets, capsules, or pills). In some cases, a SupRep construct targeted to CALM3 can be administered to a mammal in a non-viral vector (e.g., in a plasmid or in a nucleic acid molecule complexed with lipids, polymers, or nanospheres), and can be delivered by direct injection to a tissue (e.g., the myocardium), or by intraperitoneal, intranasal, intravenous, intrathecal, intracerebral, or intraparenchymal administration, or by oral delivery. After administration, the mammal can be monitored for symptoms of LQTS or CPVT, to determine whether one or more symptoms of the disorder are diminished. For example, effective SupRep treatment of a mammal having LQTS or CPVT associated with a pathogenic mutation in CALM3 can result in a reduction in symptoms such as rapid heartbeat, fainting, seizures, dizziness, lightheadedness, and/or VT. In some cases, effective SupRep treatment of a mammal having LQTS or CPVT associated with a pathogenic CALM3 mutation can result in an normalization of I_{Ks} current density, normalization of cardiac APD, and/or regulation of heart rhythm.

[0195] In another embodiment, a mammal having TKOS associated with a pathogenic mutation in the TRDN gene can be identified by, for example, analyzing a biological sample (e.g., analyzing a blood sample using PCR and/or DNA sequencing methods) obtained from the mammal to determine whether DNA in the sample includes a pathogenic mutation in the TRDN gene. Pathogenic mutations in or encoded by the TRDN gene include, without limitation, c.613C>T (p.Q205X), c.22+29A>G (p.N9fs*5), c.438_442delTAAGA (p.K147fs*0), c.53_56delACAG (p.D18fs*13), c.423delA (p.E142fs*33), c.502G>T (p.E168X), c.503G>T (p.E168X), c.545_546insA (p.K182fs*10), c.420delA (p.K140fs*34), c.176C>G (p.T59R), c.613C>T (p.Q205X), c.53_56delACAG (p.D18fs*13), c.618delG (p.A208fs*15), and c.232+2T>A. See, also, Clemens et al., Circulation: Gen Precision Med. 12(2): e002419; and Altmann et al., Circulation. 2015, 131(23):2051-2060. SupRep constructs targeted to mutant TRDN alleles can be designed to suppress the mutant TRDN alleles and replace them with a wild type TRDN allele. SupRep constructs targeted to mutant TRDN alleles can be designed and prepared using methods described, for example, in the Examples herein. For example, a SupRep construct can be generated to target a TRDN allele containing a pathogenic mutation, either by targeting a region of a disease-associated TRDN allele that contains a pathogenic mutation, or by targeting a region of a disease-associated TRDN allele that does not contain a pathogenic mutation. The SupRep constructs can be tested for their ability to suppress a mutant TRDN allele and replace it with a wild type TRDN allele. For example, constructs can be tested in an in vitro model system by co-transfecting cultured cells with a wild type TRDN construct and a shTRDN construct, and measuring TRDN expression with qRT-PCR and/or western blotting. A construct having a relatively high ability to knock down TRDN expression (e.g., the ability to knock down at least 70 percent, at least 75 percent, at least 80 percent, at least 85 percent, at least 90 percent, at least 95 percent, at least 98 percent, or at least 99 percent of TRDN expression at the mRNA and/or protein level) can be selected. The selected construct can be packaged in a virus particle (e.g., an AAV particle) and delivered to a mammal identified as having a pathogenic mutation in the TRDN gene at a dose of, for example, about 10¹⁰ vg/kg to about 10¹⁵ vg/kg, or about 10¹⁰ AAV particles/mL to about 10¹⁵ AAV particles/mL, using any appropriate route of administration (e.g., via direct injection into a tissue such as the myocardium, or via intraperitoneal administration, intranasal administration, intravenous administration, intrathecal administration, intracerebral administration, intraparenchymal administration, or oral delivery in nanoparticles and/or drug tablets, capsules, or pills). In some cases, a SupRep construct targeted to TRDN can be administered to a mammal in a non-viral vector (e.g., in a plasmid or in a nucleic acid molecule complexed with lipids, polymers, or nanospheres), and can be delivered by direct injection to a tissue (e.g., the myocardium), or by intraperitoneal, intranasal, intravenous, intrathecal, intracerebral, or intraparenchymal administration, or by oral delivery. After administration, the mammal can be monitored for symptoms of TKOS, to determine whether one or more symptoms of the disorder are diminished. For example, effective SupRep treatment of a mammal having TKOS associated with a pathogenic mutation in TRDN can result in a reduction in symptoms such as fainting, skeletal myopathy, and/or proximal muscle weakness. In some cases, effective SupRep treatment of a mammal having TKOS associated with a pathogenic TRDN mutation can result in correction of T-wave inversions and/or QT prolongation.

[0196] In another embodiment, a mammal having CPVT associated with a pathogenic mutation in the RYR2 gene can be identified by, for example, analyzing a biological sample (e.g., analyzing a blood sample using PCR and/or DNA sequencing methods) obtained from the mammal to determine whether DNA in the sample includes a pathogenic mutation in the RYR2 gene. Pathogenic mutations in or encoded by the RYR2 gene include, without limitation, c.1258C>T (p.R420W), c.1259G>A (p.R420Q), c.1519G>A (p.V507I), c.3407C>T (p.A1136V), c.5170G>A (p.E1724K), c.5654G>A (p.G1885E), c.5656G>A (p.G1886S), c.6504C>G (p.H2168Q), c.7158G>A (p.A2387T), c.8874A>G (p.Q2958R), c.12533A>G (p.N4178S), c.13528G>A (p.A4510T), c.14311G>A (p.V4771I), c.14542G>A (p.I4848V), and c.14876G>A (p.R4959Q). See, also, Medeiros-Domingo et al., J Am Coll Cardiol. 2009, 54(22):2065-2074; and Jiang et al., Proc Natl Acad Sci USA. 2004, 101(35): 13062-13067. SupRep constructs targeted to mutant RYR2 alleles can be designed to suppress the mutant RYR2 alleles and replace them with a wild type RYR2 allele. SupRep constructs targeted to mutant RYR2 alleles can be designed and prepared using methods described, for example, in the Examples herein. For example, a SupRep construct can be generated to target a RYR2 allele containing a pathogenic mutation, either by targeting a region of a disease-associated RYR2 allele that contains a pathogenic mutation, or by targeting a region of a disease-associated RYR2 allele that does not contain a pathogenic mutation. The SupRep constructs can be tested for their ability to suppress a mutant RYR2 allele and replace it with a wild type RYR2 allele. For example, constructs can be tested in an in vitro model system by co-transfecting cultured cells with a wild type RYR2 construct and a shRYR2 construct, and measuring RYR2 expression with qRT-PCR and/or western blotting. A construct having a relatively high ability to knock down RYR2 expression (e.g., the ability to knock down at least 70 percent, at least 75 percent, at least 80 percent, at least 85 percent, at least 90 percent, at least 95 percent, at least 98 percent, or at least 99 percent of RYR2 expression at the mRNA and/or protein level) can be selected. The selected construct can be packaged in a virus particle (e.g., an AAV particle) and delivered to a mammal identified as having a pathogenic mutation in the RYR2 gene at a dose of, for example, about 10¹⁰ vg/kg to about 10¹⁵ vg/kg, or about 10¹⁰ AAV particles/mL to about 10¹⁵ AAV particles/mL, using any appropriate route of administration (e.g., via direct injection into a tissue such as the myocardium, or via intraperitoneal administration, intranasal administration, intravenous administration, intrathecal administration, intracerebral administration, intraparenchymal administration, or oral delivery in nanoparticles and/or drug tablets, capsules, or pills). In some cases, a SupRep construct targeted to RYR2 can be administered to a mammal in a non-viral vector (e.g., in a plasmid or in a nucleic acid molecule complexed with lipids, polymers, or nanospheres), and can be delivered by direct injection to a tissue (e.g., the myocardium), or by intraperitoneal, intranasal, intravenous, intrathecal, intracerebral, or intraparenchymal administration, or by oral delivery. After administration, the mammal can be monitored for symptoms of CPVT, to determine whether one or more symptoms of the disorder are diminished. For example, effective SupRep treatment of a mammal having CPVT associated with a pathogenic mutation in RYR2 can result in a reduction in symptoms such as dizziness, lightheadedness, fainting, and/or VT. In some cases, effective SupRep treatment of a mammal having CPVT associated with a pathogenic RYR2 mutation can result in normalization and/or regulation of the heart rhythm.

[0197] In another embodiment, a mammal having FH associated with a pathogenic mutation in the APOB gene can be identified by, for example, analyzing a biological sample (e.g., analyzing a blood sample using PCR and/or DNA sequencing methods) obtained from the mammal to determine whether DNA in the sample includes a pathogenic mutation in the APOB gene. Pathogenic mutations in or encoded by the APOB gene include, without limitation, c.10093C>G (p.H3365D), c.4163G>A (p.R1388H), c.10579C>T (p.R3527W), p.P994L, and p.T3826M. See, also, Alves et al., Atherosclerosis. 2018, 277:P448-456; Sun et al., Lipids Health Dis. 2018, 17:252; and Cui et al., Clin Cardiol. 2019, 42:385-390. SupRep constructs targeted to mutant APOB alleles can be designed to suppress the mutant APOB alleles and replace them with a wild type APOB allele. SupRep constructs targeted to mutant APOB alleles can be designed and prepared using methods described, for example, in the Examples herein. For example, a SupRep construct can be generated to target a APOB allele containing a pathogenic mutation, either by targeting a region of a disease-associated APOB allele that contains a pathogenic mutation, or by targeting a region of a disease-associated APOB allele that does not contain a pathogenic mutation. The SupRep constructs can be tested for their ability to suppress a mutant APOB allele and replace it with a wild type APOB allele. For example, constructs can be tested in an in vitro model system by co-transfecting cultured cells with a wild type APOB construct and a shAPOB construct, and measuring APOB expression with qRT-PCR and/or western blotting. A construct having a relatively high ability to knock down APOB expression (e.g., the ability to knock down at least 70 percent, at least 75 percent, at least 80 percent, at least 85 percent, at least 90 percent, at least 95 percent, at least 98 percent, or at least 99 percent of APOB expression at the mRNA and/or protein level) can be selected. The selected construct can be packaged in a virus particle (e.g., an AAV particle) and delivered to a mammal identified as having a pathogenic mutation in the APOB gene at a dose of, for example, about 10¹⁰ vg/kg to about 10¹⁵ vg/kg, or about 10¹⁰ AAV particles/mL to about 10¹⁵ AAV particles/mL, using any appropriate route of administration (e.g., via direct injection into a tissue such as the myocardium, or via intraperitoneal administration, intranasal administration, intravenous administration, intrathecal administration, intracerebral administration, intraparenchymal administration, or oral delivery in nanoparticles and/or drug tablets, capsules, or pills). In some cases, a SupRep construct targeted to APOB can be administered to a mammal in a non-viral vector (e.g., in a plasmid or in a nucleic acid molecule complexed with lipids, polymers, or nanospheres), and can be delivered by direct injection to a tissue (e.g., the myocardium), or by intraperitoneal, intranasal, intravenous, intrathecal, intracerebral, or intraparenchymal administration, or by oral delivery. After administration, the mammal can be monitored for symptoms of FH, to determine whether one or more symptoms of the disorder are diminished. For example, effective SupRep treatment of a mammal having FH associated with a pathogenic mutation in APOB can result in a reduction in symptoms such as elevated total and LDL cholesterol levels, angina, and/or xanthomas. In some cases, effective SupRep treatment of a mammal having FH associated with a pathogenic APOB mutation can alleviate cerebrovascular disease and/or peripheral vascular disease associated with the FH.

[0198] In another embodiment, a mammal having DCM or HCM associated with a pathogenic mutation in the TNNI3 gene can be identified by, for example, analyzing a biological sample (e.g., analyzing a blood sample using PCR and/or DNA sequencing methods) obtained from the mammal to determine whether DNA in the sample includes a pathogenic mutation in the TNNI3 gene. Pathogenic mutations in or encoded by the TNNI3 gene include, without limitation, p.K36Q, p.N185K, and p.98_{truncation}, c.407G>A (p.R136Q), c.433C>T (p.R145W), c.448A>T (p.S150C), c.549G>T (p.K183N), and c.557G>A (p.R186Q). See, also, Bollen et al., J Physiol. 2017, 595(14):4677-4693; and Millat et al., supra. SupRep constructs targeted to mutant TNNI3 alleles can be designed to suppress the mutant TNNI3 alleles and replace them with a wild type TNNI3 allele. SupRep constructs targeted to mutant TNNI3 alleles can be designed and prepared using methods described, for example, in the Examples herein. For example, a SupRep construct can be generated to target a TNNI3 allele containing a pathogenic mutation, either by targeting a region of a disease-associated TNNI3 allele that contains a pathogenic mutation, or by targeting a region of a disease-associated TNNI3 allele that does not contain a pathogenic mutation. The SupRep constructs can be tested for their ability to suppress a mutant TNNI3 allele and replace it with a wild type TNNI3 allele. For example, constructs can be tested in an in vitro model system by co-transfecting cultured cells with a wild type TNNI3 construct and a shTNNI3 construct, and measuring TNNI3 expression with qRT-PCR and/or western blotting. A construct having a relatively high ability to knock down TNNI3 expression (e.g., the ability to knock down at least 50 percent, at least 75 percent, at least 80 percent, at least 85 percent, at least 90 percent, at least 95 percent, at least 98 percent, or at least 99 percent of TNNI3 expression at the mRNA and/or protein level) can be selected. The selected construct can be packaged in a virus particle (e.g., an AAV particle) and delivered to a mammal identified as having a pathogenic mutation in the TNNI3 gene at a dose of, for example, about 10¹⁰ vg/kg to about 10¹⁵ vg/kg, or about 10¹⁰ AAV particles/mL to about 10¹⁵ AAV particles/mL, using any appropriate route of administration (e.g., via direct injection into a tissue such as the myocardium, or via intraperitoneal administration, intranasal administration, intravenous administration, intrathecal administration, intracerebral administration, intraparenchymal administration, or oral delivery in nanoparticles and/or drug tablets, capsules, or pills). In some cases, a SupRep construct targeted to TNNI3 can be administered to a mammal in a non-viral vector (e.g., in a plasmid or in a nucleic acid molecule complexed with lipids, polymers, or nanospheres), and can be delivered by direct injection to a tissue (e.g., the myocardium), or by intraperitoneal, intranasal, intravenous, intrathecal, intracerebral, or intraparenchymal administration, or by oral delivery. After administration, the mammal can be monitored for symptoms of DCM or HCM, to determine whether one or more symptoms of the disorder are diminished. For example, effective SupRep treatment of a mammal having DCM or HCM associated with a pathogenic mutation in TNNI3 can result in a reduction in symptoms such as dyspnea, rapid heartbeat, chest pain, fainting, dizziness, fatigue, edema of the legs and/or ankles, arrhythmia, lightheadedness, and/or heart palpitations. In some cases, effective SupRep treatment of a mammal having DCM or HCM associated with a pathogenic TNNI3 mutation can result in reduced contractility, improved relaxation, reduced energy consumption, normalization of LV size, and/or strengthening of the LV.

[0199] In another embodiment, a mammal having DCM or HCM associated with a pathogenic mutation in the TNNC1 gene can be identified by, for example, analyzing a biological sample (e.g., analyzing a blood sample using PCR and/or DNA sequencing methods) obtained from the mammal to determine whether DNA in the sample includes a pathogenic mutation in the TNNC1 gene. Pathogenic mutations in or encoded by the TNNC1 gene include, without limitation, c.91G>T (p.A31S), p.Y5H, p.M103I, p.I148V, p.A8V, p.L29Q, p.C84Y, p.E134D, p.D145E, and p.Q122AfsX30. See, also, Parvatiyar et al., J Blot Chem. 2012, 287(38):31845-31855; and Veltri et al., Front Physiol. 2017, 8:221. SupRep constructs targeted to mutant TNNC1 alleles can be designed to suppress the mutant TNNC1 alleles and replace them with a wild type TNNC1 allele. SupRep constructs targeted to mutant TNNC1 alleles can be designed and prepared using methods described, for example, in the Examples herein. For example, a SupRep construct can be generated to target a TNNC1 allele containing a pathogenic mutation, either by targeting a region of a disease-associated TNNC1 allele that contains a pathogenic mutation, or by targeting a region of a disease-associated TNNC1 allele that does not contain a pathogenic mutation. The SupRep constructs can be tested for their ability to suppress a mutant TNNC1 allele and replace it with a wild type TNNC1 allele. For example, constructs can be tested in an in vitro model system by co-transfecting cultured cells with a wild type TNNC1 construct and a shTNNC1 construct, and measuring TNNC1 expression with qRT-PCR and/or western blotting. A construct having a relatively high ability to knock down TNNC1 expression (e.g., the ability to knock down at least 70 percent, at least 75 percent, at least 80 percent, at least 85 percent, at least 90 percent, at least 95 percent, at least 98 percent, or at least 99 percent of TNNC1 expression at the mRNA and/or protein level) can be selected. The selected construct can be packaged in a virus particle (e.g., an AAV particle) and delivered to a mammal identified as having a pathogenic mutation in the TNNC1 gene at a dose of, for example, about 10¹⁰ vg/kg to about 10¹⁵ vg/kg, or about 10¹⁰ AAV particles/mL to about 10¹⁵ AAV particles/mL, using any appropriate route of administration (e.g., via direct injection into a tissue such as the myocardium, or via intraperitoneal administration, intranasal administration, intravenous administration, intrathecal administration, intracerebral administration, intraparenchymal administration, or oral delivery in nanoparticles and/or drug tablets, capsules, or pills). In some cases, a SupRep construct targeted to TNNC1 can be administered to a mammal in a non-viral vector (e.g., in a plasmid or in a nucleic acid molecule complexed with lipids, polymers, or nanospheres), and can be delivered by direct injection to a tissue (e.g., the myocardium), or by intraperitoneal, intranasal, intravenous, intrathecal, intracerebral, or intraparenchymal administration, or by oral delivery. After administration, the mammal can be monitored for symptoms of DCM or HCM, to determine whether one or more symptoms of the disorder are diminished. For example, effective SupRep treatment of a mammal having DCM or HCM associated with a pathogenic mutation in TNNC1 can result in a reduction in symptoms such as dyspnea, rapid heartbeat, chest pain, fainting, dizziness, fatigue, edema of the legs and/or ankles, arrhythmia, lightheadedness, and/or heart palpitations. In some cases, effective SupRep treatment of a mammal having DCM or HCM associated with a pathogenic TNNC1 mutation can result in reduced contractility, improved relaxation, reduced energy consumption, normalization of LV size, and/or strengthening of the LV.

[0200] In another embodiment, a mammal having DCM or HCM associated with a pathogenic mutation in the MYL2 gene can be identified by, for example, analyzing a biological sample (e.g., analyzing a blood sample using PCR and/or DNA sequencing methods) obtained from the mammal to determine whether DNA in the sample includes a pathogenic mutation in the MYL2 gene. Pathogenic mutations in or encoded by the MYL2 gene include, without limitation, p.D94A, p.D166A, p.P95A, and p.I158L. See, also, Huang et al., FEBS J. 2015, 282(12):2379-2393; Alvarez-Acosta et al., J Cardiovasc Dis. 2014, 2; and Poetter et al., Nat Genet. 1996, 13:63-69. SupRep constructs targeted to mutant MYL2 alleles can be designed to suppress the mutant MYL2 alleles and replace them with a wild type MYL2 allele. SupRep constructs targeted to mutant MYL2 alleles can be designed and prepared using methods described, for example, in the Examples herein. For example, a SupRep construct can be generated to target a MYL2 allele containing a pathogenic mutation, either by targeting a region of a disease-associated MYL2 allele that contains a pathogenic mutation, or by targeting a region of a disease-associated MYL2 allele that does not contain a pathogenic mutation. The SupRep constructs can be tested for their ability to suppress a mutant MYL2 allele and replace it with a wild type MYL2 allele. For example, constructs can be tested in an in vitro model system by co-transfecting cultured cells with a wild type MYL2 construct and a shMYL2 construct, and measuring MYL2 expression with qRT-PCR and/or western blotting. A construct having a relatively high ability to knock down MYL2 expression (e.g., the ability to knock down at least 70 percent, at least 75 percent, at least 80 percent, at least 85 percent, at least 90 percent, at least 95 percent, at least 98 percent, or at least 99 percent of MYL2 expression at the mRNA and/or protein level) can be selected. The selected construct can be packaged in a virus particle (e.g., an AAV particle) and delivered to a mammal identified as having a pathogenic mutation in the MYL2 gene at a dose of, for example, about 10¹⁰ vg/kg to about 10¹⁵ vg/kg, or about 10¹⁰ AAV particles/mL to about 10¹⁵ AAV particles/mL, using any appropriate route of administration (e.g., via direct injection into a tissue such as the myocardium, or via intraperitoneal administration, intranasal administration, intravenous administration, intrathecal administration, intracerebral administration, intraparenchymal administration, or oral delivery in nanoparticles and/or drug tablets, capsules, or pills). In some cases, a SupRep construct targeted to MYL2 can be administered to a mammal in a non-viral vector (e.g., in a plasmid or in a nucleic acid molecule complexed with lipids, polymers, or nanospheres), and can be delivered by direct injection to a tissue (e.g., the myocardium), or by intraperitoneal, intranasal, intravenous, intrathecal, intracerebral, or intraparenchymal administration, or by oral delivery. After administration, the mammal can be monitored for symptoms of DCM or HCM, to determine whether one or more symptoms of the disorder are diminished. For example, effective SupRep treatment of a mammal having DCM or HCM associated with a pathogenic mutation in MYL2 can result in a reduction in symptoms such as dyspnea, rapid heartbeat, chest pain, fainting, dizziness, fatigue, edema of the legs and/or ankles, arrhythmia, lightheadedness, and/or heart palpitations. In some cases, effective SupRep treatment of a mammal having DCM or HCM associated with a pathogenic MYL2 mutation can result in reduced contractility, improved relaxation, reduced energy consumption, normalization of LV size, and/or strengthening of the LV.

[0201] In another embodiment, a mammal having DCM or HCM associated with a pathogenic mutation in the MYL3 gene can be identified by, for example, analyzing a biological sample (e.g., analyzing a blood sample using PCR and/or DNA sequencing methods) obtained from the mammal to determine whether DNA in the sample includes a pathogenic mutation in the MYL3 gene. Pathogenic mutations in or encoded by the MYL3 gene include, without limitation, c.170C>G (p.A57G), c.530 A>G, c.2155C>T (p. R719W), c.77C>T (p.A26V), c.2654A>C (p.N885T), and c.1987C>T (p.R663C). See, also, Poetter et al., supra; and Zhao et al., Int J Mol Med. 2016, 37:1511-1520. SupRep constructs targeted to mutant MYL3 alleles can be designed to suppress the mutant MYL3 alleles and replace them with a wild type MYL3 allele. SupRep constructs targeted to mutant MYL3 alleles can be designed and prepared using methods described, for example, in the Examples herein. For example, a SupRep construct can be generated to target a MYL3 allele containing a pathogenic mutation, either by targeting a region of a disease-associated MYL3 allele that contains a pathogenic mutation, or by targeting a region of a disease-associated MYL3 allele that does not contain a pathogenic mutation. The SupRep constructs can be tested for their ability to suppress a mutant MYL3 allele and replace it with a wild type MYL3 allele. For example, constructs can be tested in an in vitro model system by co-transfecting cultured cells with a wild type MYL3 construct and a shMYL3 construct, and measuring MYL3 expression with qRT-PCR and/or western blotting. A construct having a relatively high ability to knock down MYL3 expression (e.g., the ability to knock down at least 70 percent, at least 75 percent, at least 80 percent, at least 85 percent, at least 90 percent, at least 95 percent, at least 98 percent, or at least 99 percent of MYL3 expression at the mRNA and/or protein level) can be selected. The selected construct can be packaged in a virus particle (e.g., an AAV particle) and delivered to a mammal identified as having a pathogenic mutation in the MYL3 gene at a dose of, for example, about 10¹⁰ vg/kg to about 10¹⁵ vg/kg, or about 10¹⁰ AAV particles/mL to about 10¹⁵ AAV particles/mL, using any appropriate route of administration (e.g., via direct injection into a tissue such as the myocardium, or via intraperitoneal administration, intranasal administration, intravenous administration, intrathecal administration, intracerebral administration, intraparenchymal administration, or oral delivery in nanoparticles and/or drug tablets, capsules, or pills). In some cases, a SupRep construct targeted to MYL3 can be administered to a mammal in a non-viral vector (e.g., in a plasmid or in a nucleic acid molecule complexed with lipids, polymers, or nanospheres), and can be delivered by direct injection to a tissue (e.g., the myocardium), or by intraperitoneal, intranasal, intravenous, intrathecal, intracerebral, or intraparenchymal administration, or by oral delivery. After administration, the mammal can be monitored for symptoms of DCM or HCM, to determine whether one or more symptoms of the disorder are diminished. For example, effective SupRep treatment of a mammal having DCM or HCM associated with a pathogenic mutation in MYL3 can result in a reduction in symptoms such as dyspnea, rapid heartbeat, chest pain, fainting, dizziness, fatigue, edema of the legs and/or ankles, arrhythmia, lightheadedness, and/or heart palpitations. In some cases, effective SupRep treatment of a mammal having DCM or HCM associated with a pathogenic MYL3 mutation can result in reduced contractility, improved relaxation, reduced energy consumption, normalization of LV size, and/or strengthening of the LV.

[0202] In another embodiment, a mammal having DCM or HCM associated with a pathogenic mutation in the JPH2 gene can be identified by, for example, analyzing a biological sample (e.g., analyzing a blood sample using PCR and/or DNA sequencing methods) obtained from the mammal to determine whether DNA in the sample includes a pathogenic mutation in the JPH2 gene. Pathogenic mutations in or encoded by the JPH2 gene include, without limitation, p.S101R, p.Y141H, p.S165F, p.T161K, and p.E641X. See, also, Landstrom et al., J Mol Cell Cardiol. 2007, 42:1026-1035; and Jones et al., Sci Rep. 2019, 9:9038. SupRep constructs targeted to mutant JPH2 alleles can be designed to suppress the mutant JPH2 alleles and replace them with a wild type JPH2 allele. SupRep constructs targeted to mutant JPH2 alleles can be designed and prepared using methods described, for example, in the Examples herein. For example, a SupRep construct can be generated to target a JPH2 allele containing a pathogenic mutation, either by targeting a region of a disease-associated JPH2 allele that contains a pathogenic mutation, or by targeting a region of a disease-associated JPH2 allele that does not contain a pathogenic mutation. The SupRep constructs can be tested for their ability to suppress a mutant JPH2 allele and replace it with a wild type JPH2 allele. For example, constructs can be tested in an in vitro model system by co-transfecting cultured cells with a wild type JPH2 construct and a shJPH2 construct, and measuring JPH2 expression with qRT-PCR and/or western blotting. A construct having a relatively high ability to knock down JPH2 expression (e.g., the ability to knock down at least 70 percent, at least 75 percent, at least 80 percent, at least 85 percent, at least 90 percent, at least 95 percent, at least 98 percent, or at least 99 percent of JPH2 expression at the mRNA and/or protein level) can be selected. The selected construct can be packaged in a virus particle (e.g., an AAV particle) and delivered to a mammal identified as having a pathogenic mutation in the JPH2 gene at a dose of, for example, about 10¹⁰ vg/kg to about 10¹⁵ vg/kg, or about 10¹⁰ AAV particles/mL to about 10¹⁵ AAV particles/mL, using any appropriate route of administration (e.g., via direct injection into a tissue such as the myocardium, or via intraperitoneal administration, intranasal administration, intravenous administration, intrathecal administration, intracerebral administration, intraparenchymal administration, or oral delivery in nanoparticles and/or drug tablets, capsules, or pills). In some cases, a SupRep construct targeted to JPH2 can be administered to a mammal in a non-viral vector (e.g., in a plasmid or in a nucleic acid molecule complexed with lipids, polymers, or nanospheres), and can be delivered by direct injection to a tissue (e.g., the myocardium), or by intraperitoneal, intranasal, intravenous, intrathecal, intracerebral, or intraparenchymal administration, or by oral delivery. After administration, the mammal can be monitored for symptoms of DCM or HCM, to determine whether one or more symptoms of the disorder are diminished. For example, effective SupRep treatment of a mammal having DCM or HCM associated with a pathogenic mutation in JPH2 can result in a reduction in symptoms such as dyspnea, rapid heartbeat, chest pain, fainting, dizziness, fatigue, edema of the legs and/or ankles, arrhythmia, lightheadedness, and/or heart palpitations. In some cases, effective SupRep treatment of a mammal having DCM or HCM associated with a pathogenic JPH2 mutation can result in reduced contractility, improved relaxation, reduced energy consumption, normalization of LV size, and/or strengthening of the LV.

[0203] In another embodiment, a mammal having LQTS, HCM, or LGMD associated with a pathogenic mutation in the CAV3 gene can be identified by, for example, analyzing a biological sample (e.g., analyzing a blood sample using PCR and/or DNA sequencing methods) obtained from the mammal to determine whether DNA in the sample includes a pathogenic mutation in the CAV3 gene. Pathogenic mutations in or encoded by the CAV3 gene include, without limitation, c.233 C>T (p.T78M), c.253 G>A (p.A85T), c.290 T>G (p.F97C), c.423 C>G (p.S141R), p.P104L, and p.R27Q. See, also, Shah et al., J Cachexia Sarcopenia Muscle 2020, 11(3):838-858; and Vatta et al., Circulation. 2006, 114:2104-2112. SupRep constructs targeted to mutant CAV3 alleles can be designed to suppress the mutant CAV3 alleles and replace them with a wild type CAV3 allele. SupRep constructs targeted to mutant CAV3 alleles can be designed and prepared using methods described, for example, in the Examples herein. For example, a SupRep construct can be generated to target a CAV3 allele containing a pathogenic mutation, either by targeting a region of a disease-associated CAV3 allele that contains a pathogenic mutation, or by targeting a region of a disease-associated CAV3 allele that does not contain a pathogenic mutation. The SupRep constructs can be tested for their ability to suppress a mutant CAV3 allele and replace it with a wild type CAV3 allele. For example, constructs can be tested in an in vitro model system by co-transfecting cultured cells with a wild type CAV3 construct and a shCAV3 construct, and measuring CAV3 expression with qRT-PCR and/or western blotting. A construct having a relatively high ability to knock down CAV3 expression (e.g., the ability to knock down at least 70 percent, at least 75 percent, at least 80 percent, at least 85 percent, at least 90 percent, at least 95 percent, at least 98 percent, or at least 99 percent of CAV3 expression at the mRNA and/or protein level) can be selected. The selected construct can be packaged in a virus particle (e.g., an AAV particle) and delivered to a mammal identified as having a pathogenic mutation in the CAV3 gene at a dose of, for example, about 10¹⁰ vg/kg to about 10¹⁵ vg/kg, or about 10¹⁰ AAV particles/mL to about 10¹⁵ AAV particles/mL, using any appropriate route of administration (e.g., via direct injection into a tissue such as the myocardium, or via intraperitoneal administration, intranasal administration, intravenous administration, intrathecal administration, intracerebral administration, intraparenchymal administration, or oral delivery in nanoparticles and/or drug tablets, capsules, or pills). In some cases, a SupRep construct targeted to CAV3 can be administered to a mammal in a non-viral vector (e.g., in a plasmid or in a nucleic acid molecule complexed with lipids, polymers, or nanospheres), and can be delivered by direct injection to a tissue (e.g., the myocardium), or by intraperitoneal, intranasal, intravenous, intrathecal, intracerebral, or intraparenchymal administration, or by oral delivery. After administration, the mammal can be monitored for symptoms of LQTS, HCM, or LGMD, to determine whether one or more symptoms of the disorder are diminished. For example, effective SupRep treatment of a mammal having LQTS, HCM, or LGMD associated with a pathogenic mutation in CAV3 can result in a reduction in symptoms such as dyspnea, rapid heartbeat, arrhythmia, chest pain, fainting, dizziness, seizures, fatigue, atrophy and/or weakness of muscles in the hip and shoulder areas, cardiomyopathy. In some cases, effective SupRep treatment of a mammal having LQTS, HCM, or LGMD associated with a pathogenic CAV3 mutation can result in reduced contractility, improved relaxation, and/or reduced energy consumption.

[0204] In another embodiment, a mammal having LQTS or CPVT associated with a pathogenic mutation in the TECRL gene can be identified by, for example, analyzing a biological sample (e.g., analyzing a blood sample using PCR and/or DNA sequencing methods) obtained from the mammal to determine whether DNA in the sample includes a pathogenic mutation in the TECRL gene. Pathogenic mutations in or encoded by the TECRL gene include, without limitation, p.R196Q, c.331+1G>A, p.Q139X, p.P290H, p.S309X, and p.V298A. See, also, Devalla et al., EMBO Mol Med. 2016, 8(12):1390-1408; and Moscu-Gregor et al., J Cardiovasc Electrophysiol. 2020, 31(6):1527-1535. SupRep constructs targeted to mutant TECRL alleles can be designed to suppress the mutant TECRL alleles and replace them with a wild type TECRL allele. SupRep constructs targeted to mutant TECRL alleles can be designed and prepared using methods described, for example, in the Examples herein. For example, a SupRep construct can be generated to target a TECRL allele containing a pathogenic mutation, either by targeting a region of a disease-associated TECRL allele that contains a pathogenic mutation, or by targeting a region of a disease-associated TECRL allele that does not contain a pathogenic mutation. The SupRep constructs can be tested for their ability to suppress a mutant TECRL allele and replace it with a wild type TECRL allele. For example, constructs can be tested in an in vitro model system by co-transfecting cultured cells with a wild type TECRL construct and a shTECRL construct, and measuring TECRL expression with qRT-PCR and/or western blotting. A construct having a relatively high ability to knock down TECRL expression (e.g., the ability to knock down at least 70 percent, at least 75 percent, at least 80 percent, at least 85 percent, at least 90 percent, at least 95 percent, at least 98 percent, or at least 99 percent of TECRL expression at the mRNA and/or protein level) can be selected. The selected construct can be packaged in a virus particle (e.g., an AAV particle) and delivered to a mammal identified as having a pathogenic mutation in the TECRL gene at a dose of, for example, about 10¹⁰ vg/kg to about 10¹⁵ vg/kg, or about 10¹⁰ AAV particles/mL to about 10¹⁵ AAV particles/mL, using any appropriate route of administration (e.g., via direct injection into a tissue such as the myocardium, or via intraperitoneal administration, intranasal administration, intravenous administration, intrathecal administration, intracerebral administration, intraparenchymal administration, or oral delivery in nanoparticles and/or drug tablets, capsules, or pills). In some cases, a SupRep construct targeted to TECRL can be administered to a mammal in a non-viral vector (e.g., in a plasmid or in a nucleic acid molecule complexed with lipids, polymers, or nanospheres), and can be delivered by direct injection to a tissue (e.g., the myocardium), or by intraperitoneal, intranasal, intravenous, intrathecal, intracerebral, or intraparenchymal administration, or by oral delivery. After administration, the mammal can be monitored for symptoms of LQTS or CPVT, to determine whether one or more symptoms of the disorder are diminished. For example, effective SupRep treatment of a mammal having LQTS or CPVT associated with a pathogenic mutation in TECRL can result in a reduction in symptoms such as rapid heartbeat, fainting, seizures, dizziness, lightheadedness, and/or VT. In some cases, effective SupRep treatment of a mammal having LQTS or CPVT associated with a pathogenic TECRL mutation can result in an normalization of IKs current density, normalization of cardiac APD, and/or regulation of heart rhythm.

[0205] The invention will be further described in the following examples, which do not limit the scope of the invention described in the claims.

### EXAMPLES

### Example 1—Materials and Methods

[0206] Samples: Human samples were obtained from patients with LQT1 and from an unrelated healthy control (TABLE 2).

[0207] Plasmids and Cloning of KCNQ1-SupRep: WT KCNQ1 cDNA (NM_000218.2) was subcloned into pIRES2-EGFP (Clontech; Mountain View, CA) using NheI and BamHI restriction sites. The QuikChange II XL site-directed mutagenesis kit (Agilent; Santa Clara, CA) was used to introduce two missense variants (p. T66S and p. Y67W) into the chromophore domain of EGFP, converting it to a cyan fluorescent protein and creating pIRES2-CFP-KCNQ1-WT. A second round of site-directed mutagenesis was completed using pIRES2-CFP-KCNQ1-WT to introduce the KCNQ1 variants p.Y171X, p.V254M, and p.I5675 (c.513C>A, c.760G>A, and c.1700T>G, respectively). Four pre-designed KCNQ1 shRNAs (sh#1-4) were purchased from OriGene (Rockville, MD) in the pGFP-C-shLenti backbone along with a non-targeting scramble shRNA control (shCT). The shRNA sequences are listed in TABLE 3A. KCNQ1 sh#4 was selected for the final KCNQ1-SupRep gene therapy vector and is referred to throughout this document as shKCNQ1. A DNA fragment containing ten synonymous variants within the KCNQ1 sh#4 (shKCNQ1) target sequence of the KCNQ1-WT cDNA: c.1377C>T, c.1380C>A, c.1383T>C, c.1386C>T, c.1389T>C, c.1392T>C, c.1395A>C, c.1398G>A, c.1401G>A, and c.1404C>T (KCNQ1: p.D459D, p.G460G, p.Y461Y, p.D462D, p.S463S, p.S464S, p.V465V, p.R466R, p.K467K, and p.S468S, respectively) was synthesized and cloned into pIRES2-CFP-KCNQ1-WT using BglII and PvuI restriction sites to create KCNQ1-shIMM (pIRES2-CFP-KCNQ1-shIMM) (GenScript; Piscataway, NJ). KCNQ1-shIMM and the CFP reporter were then PCR subcloned into the pGFP-C-shLenti backbone containing shKCNQ1 using 5′MluI and 3′ BsrGI+reverseBsaI restriction sites, excising the original GFP in the process to create the final KCNQ1-SupRep (pCFP-C-shLenti-shKCNQ1-KCNQ1-shIMM). Primers used for PCR cloning were:

(forward primer; SEQ ID NO: 1)
5′-GGCACGCGTTTATGGCCGCGGCCTCCTC-3′.
and
(reverse primer; SEQ ID NO: 2)
5′-GCCGGTCTCTGTACACCGCTTTACTTGTA
CAGCTCGTCC-3′.

[0208] LQT1 and Unrelated Control Patient Selection for iPSC Generation: Patients were evaluated by a genetic cardiologist and LQTS specialist. Dermal fibroblasts or peripheral blood mononuclear cells (PBMCs) were collected by 4 mm skin punch biopsy or blood sample, respectively. Samples were obtained from nearly 1200 patients diagnosed with a variety of inherited cardiac channelopathies and their affected or unaffected family members, including 236 patients with LQT1. Four LQT1 patients were selected to span a variety of variant types (one nonsense, two missense, one synonymous splice) and phenotypes. These four patients included a lifelong asymptomatic patient and three patients with strong LQT1 phenotypes, defined as having at least one ECG with QTc greater than 500 ms, a positive history of LQTS-related symptoms (syncope, seizure, near drowning, sudden cardiac arrest), and a positive family history of LQTS-related symptoms. A presumably healthy, unaffected father of a patient hosting a de novo variant was selected as an unrelated control.

[0209] Fibroblast/PBMCs Reprogramming into iPSCs and Quality Control: Fibroblasts or PBMCs were reprogrammed by Sendai virus transduction using the CytoTune-iPS 2.0 reprogramming kit (Thermo; Waltham, MA) or electroporation with four episomal DNA plasmids containing the Yamanaka factors: pCXLE-hUL, pCXLE-hSK, pCXLE-hOCT3/4-shp53-F, and pCXWB-EBNA1 (Addgene; Watertown, MA). At least two colonies were picked within 21 days post-induction and clonally expanded. All iPSCs were cultured in mTeSR™1 (STEMCELL®; Vancouver, Canada) supplemented with 1% penicillin/streptomycin on MATRIGEL®-coated (Corning; Corning, NY) 6 cm culture dishes in a 5% CO₂ incubator at 37° C. At 85% confluence, iPSCs were passaged using ReLeSR (STEMCELL®). Each clone was then karyotyped.

[0210] All lines had normal karyotype except the patient with KCNQ1-V254M (and subsequent isogenic control), which had a reprogramming-induced balanced translocation between chromosomes 13 and 22. No genes encoding ion channels critical to the cardiac action potential are located on chromosomes 13 or 22, so these cells were still included in the study. KCNQ1 variant confirmation was conducted by Sanger sequencing of PCR-amplicons from genomic DNA. Expression of pluripotent markers in all iPSC clones was confirmed by confocal immunofluorescence microscopy using primary antibodies against Oct4 (Thermo, PAS-27438), Nanog (Thermo, PA1-097), Tra-1-60 (Santa Cruz; Dallas, TX; sc-21705), and SSEA-4 (Thermo, MA1-021) at a 1:250 dilution. Secondary antibodies were ALEXA FLUOR® 488 goat-anti-mouse (Thermo, A-11001) and ALEXA FLUOR® 594 goat-anti-rabbit (Thermo, A-11037). Counterstaining with DAPI (Thermo) was used at a 1:2000 dilution from a 5 mg/mL stock. Images were acquired on a Zeiss LSM 780 confocal microscope.

[0211] iPSC-CM Culture, Differentiation, and Dissociation: When iPSCs were 85% confluent, differentiation into cardiomyocytes (CMs) was induced as described elsewhere (Schwartz 2009, supra; and Schwartz 2013, supra). Differentiation was initiated (day 0) by changing the culture medium to RPMI 1640 GlutaMAX™ plus 25 mM HEPES ((4-(2-hydroxyethyl)-1-piperazineethanesulfonic acid)) supplemented with B27-minus insulin (RPMI/B27-ins) (Thermo) containing 51.1M CHIR99021 (MilliporeSigma; St. Louis, MO). On day 2, the medium was changed to RPMI/B27-ins containing 51.1M IWP-2 (MilliporeSigma). On day 4, the medium was changed back to the maintenance medium RPMI/B27-ins. Spontaneous beating typically began on days 6-7, with expansion to remaining cells by days 10-12. The iPSC-CMs were allowed to mature until at least day 30, changing the media twice per week. After day 30, iPSC-CMs were dissociated enzymatically using STEMdiff™ cardiomyocyte dissociation kit (STEMCELL®). Briefly, cells were rinsed with PBS (without Ca²⁺/Mg²⁺) and placed in dissociation medium for 10 minutes at 37° C., and then deactivated by addition of STEMdiff™ Cardiomyocyte Support Medium (STEMCELL®). Cells were triturated, transferred to a 15 mL conical tube, and pelleted by centrifugation at 300 rcf for 3 minutes. The supernatant was aspirated and the cells suspended in Cardiomyocyte Support Medium before transfer to appropriate MATRIGEL®-coated culture ware. After 24 hours, the medium was changed back to RPMI/B27-ins. Dissociation resulted in a mixture of single cells and small-to-medium sized iPSC-CM clusters, depending on cell density before and after plating. Spontaneous beating generally returned 24 hours after dissociation, with strong electrical coupling and syncytia formation between days 3-7.

[0212] CRISPR-Cas9 Corrected Isogenic Control iPSC: Genome editing of iPSC cell lines was contracted through Applied Stem Cell (Milpitas, CA). Isogenic “variant corrected” control iPSC cell lines were created for the two patient-specific LQT1 cells lines harboring KCNQ1-V254M (c.760G>A) and KCNQ1-A344A/spl (c.1032G>A). Guide RNAs (gRNAs) were designed using the gRNA design tool by Applied Stem Cell. Based on proximity to the target site and off-target profile, two gRNAs were selected for assessment of gRNA activity by next generation sequencing. Based on these results, the gRNAs 5′-CTGGCGGTGGATGAAGACCA-3′ (KCNQ1-V254M; SEQ ID NO:3) and 5′-CCCAGCAGTAGGTGCCCCGT-3′ (KCNQ1-A344A/spl; SEQ ID NO:4) were selected. Single-stranded oligodeoxynucleotide donors (ssODNs) were designed to be used as the repair template at the gRNA cut sites during homology directed repair. The isogenic control ssODNs were:

(KCNQ1-V254M; SEQ ID NO: 5)
5′-CAGATCCTGAGGATGCTACACGTCGACCGCC
AGGGAGGCACCTGGAGGCTGCTGGGCTCGGTGGT
CTTCATCCACCGCCAGgtgggtggcccgggttag
gggtgcggggcccag-3′
and
(KCNQ1-A344A/spl; SEQ ID NO: 6)
5′-gtgcagccaccccaggaccccagctgtcca
aggagccagggaaaacgcacacacggggcaccta
cCGCTGGGAGCGCAAAGAAGGAGATGGCAAAGAC
AGAGAAGCAGGAGGCGAT-3′,

where uppercase=exon, lowercase=intron, underline=synonymous variant to prevent re-cutting after successful editing, and underline+bold+italic=WT nucleotide to replace target variant.

[0213] The gRNA was cloned into the expression vector pBT-U6-Cas9-2A-GFP, and the resulting plasmid was transfected into iPSCs along with the ssODN. Parental iPSCs (5×10⁵) were plated on six-well plates and transfected by electroporation using 1100V, 30 ms, 1P in the Neon Transfection System (Thermo). The iPSC population was subjected to limiting dilution for cloning and genotype analysis. Genomic DNA was extracted from each iPSC clone and analyzed by Sanger sequencing for the absence of the KCNQ1-V254M and KCNQ1-A344A/spl variants, respectively.

[0214] TSA201 Cell Culture and Transfection: TSA201 cells (passage 20 or lower) were maintained in Dulbecco's Modified Eagle Medium (Corning) supplemented with 10% fetal bovine serum, 1% L-glutamine, and 1% penicillin/streptomycin in a 5% CO₂ incubator at 37° C. For patch clamp, cells were split into T25 flasks. After 24 hours, heterologous expression of the Kv7.1 channel (KCNQ1 α-subunit plus KCNE1 (3-subunit) was achieved using 5 μL LIPOFECTAMINE® 2000 (Thermo) to co-transfect 1 μg of pIRES2-CFP-KCNQ1-WT, -shIMM, -Y171X, -V254M, or 4567S and 1 μg of pIRES2-dsRED2-KCNE1-WT in OPTI-MEM® (Thermo). After 4-6 hours, the medium was replaced with the maintenance medium for 48 hours before patch clamp electrophysiology experiments. For allele-specific qRT-PCR, western blot, and trafficking immunofluorescence microscopy, 5×10⁵ cells (or 1.5×10⁶ cells for the activation kinetics time course in FIG. 9) were plated per well in 6-well plates. After 24 hours, cells were co-transfected in maintenance medium using 10 μL EFFECTENE® (Qiagen; Hilden, Germany) with 100 fmol (between 0.3-0.7 μg) equimolar amounts (or as otherwise indicated) of each plasmid pIRES2-CFP-KCNQ1-WT or -variant, pGFP-C-shLenti-shKCNQ1(#1-#4) or -shCT, pCFP-C-shLenti-KCNQ1-SupRep, or pIRES2-dsRED2-KCNE1-WT, as indicated by each figure. Endpoint assays were conducted as described in the appropriate methods sections.

[0215] Cell Membrane Trafficking Immunofluorescence Microscopy: TSA201 cells were co-transfected with KCNQ1-WT, -shIMM, or -variants and KCNE1-WT as above. After 24 hours, cells were dissociated using TrypLE™ Express (Thermo) and plated into 8-chamber culture slides (CELLTREAT®; Pepperell, MA). After another 24 hours, cells were fixed with 4% paraformaldehyde for 10 minutes and washed 3 times with PBS. Cells were blocked with 0.2% Tween-20/5% goat serum in PBS for 1 hour and incubated at 4° C. overnight using a primary antibody against KCNQ1 (Santa Cruz, sc-365186) at a 1:100 dilution. Cells were washed 3 times for 15 minutes each with PBS-0.2% TWEEN®-20 and incubated in secondary ALEXA FLUOR® 488 goat-anti-mouse (Thermo) at a dilution of 1:250 for 1 hour before washing again 3 times for 15 minutes each. DAPI (4′,6-diamidino-2-phenylindole) counterstain was added during the first wash at a concentration of 1:2000 as before. VECTASHIELD® mounting media (Vector Labs; Burlingame, CA) was diluted 1:10 in PBS and used as mounting solution, and images were acquired on a Zeiss LSM 780 confocal microscope. Results shown in the figures herein are representative of three independent experiments (defined throughout the study as “three identical repeats of each experiment conducted from start to finish on separate weeks with one biological replicate per treatment group per run”).

[0216] Western Blotting: TSA201 cells were co-transfected with KCNQ1-WT, -shIMM, or -variants and shKCNQ1(#1-4), -shCT, or KCNQ1-SupRep as described above. After 48 hours, cells were lysed in 1× RIPA buffer with protease and phosphatase inhibitors and chilled on ice for 10 minutes. Lysates were sonicated for 10 seconds at 50% amplitude and the cell debris was pelleted at 21,000 rcf for 15 minutes at 4° C. The supernatant was collected and the protein concentration quantified by BCA assay (Thermo) before mixing 1:1 with loading buffer (2X Laemmli buffer with 1:20 (3-mercaptoethanol). Importantly, the lysates were NOT denatured at 95° C., which would have caused irreversible SDS-resistant high molecular weight aggregates of the KCNQ1 proteins (Sagné et al., Biochem. J., 316(Pt 3):825-831 (1996); and Little, “Amplification-refractory mutation system (ARMS) analysis of point mutations,” Curr. Protoc. Hum. Genet., Chapter 9:Unit 9.8 (2001)). Proteins (10 μg/lane) were run on a 4-15% TGX gel (Bio-Rad; Hercules, CA) and transferred to a PVDF membrane using a Trans-Blot Turbo Transfer System (Bio-Rad). Membranes were blocked for 1 hour in tris-buffered saline (TB S) with 0.1% TWEEN®-20/3% bovine serum albumin and incubated at 4° C. overnight with primary antibodies against KCNQ1 (Santa Cruz, sc-365186) and Cofilin (Santa Cruz, sc-376476) as a housekeeping control at a 1:1000 dilution in blocking solution. The membrane was washed 3 times for 15 minutes each with TBS-0.1% TWEEN®-20 prior to addition of secondary antibody HRP-conjugated goat-anti-mouse (R&D Systems; Minneapolis, MN; HAF007) at a dilution of 1:5000 in blocking solution. The membrane was washed 3 times for 15 minutes each with TB S and incubated in SuperSignal™ West Pico PLUS chemiluminescent ECL substrate (Thermo) for 3 minutes and exposed using autoradiography film. Pixel density was quantified using freely available ImageJ software. All western blots presented herein are representative images of three independent experiments.

[0217] Allele-Specific qRT-PCR: Allele-specific primers were developed for qRT-PCR to specifically amplify (1) total KCNQ1, (2) endogenous KCNQ1 (includes KCNQ1-WT and -variants, but excludes KCNQ1-shIMM), and (3) KCNQ1-shIMM, by adapting allele-specific genotyping methods described elsewhere (TABLE 4) (Rohatgi et al., supra; and Priori et al., supra). For total KCNQ1, primers were purchased from IDT (Coralville, IA; PRIMETIME qPCR Primer Assay, Hs.PT.58.41042304). Allele-specific primers were created by designing two forward primers spanning the shKCNQ1 target site, with one complementary to endogenous KCNQ1 (allele-specific for KCNQ1-WT and -variants) and the other complementary to KCNQ1-shIMM (allele-specific for KCNQ1-shIMM). A common reverse primer was used with both allele-specific forward primers. GAPDH primers were purchased from IDT (PRIMETIME™ qPCR Primer Assay, Hs.PT.39a.22214836) as a housekeeping control. A standard curve was used to correct for PCR amplification bias. TSA201 cells were co-transfected with KCNQ1-WT, -shIMM, or -variants and shKCNQ1(#1-4), -shCT, or KCNQ1-SupRep as above. After 48 hours (or at the indicated time for the activation kinetics time-course in FIG. 9), RNA was harvested using an RNeasy kit (Qiagen) and quantified using a NanoDrop ND-1000 spectrophotometer (Thermo). Complementary DNA (cDNA) was generated by loading 500 ng RNA in the SuperScript™ IV VILO™ Master Mix reverse transcription kit (Thermo). For each sample, four qRT-PCR reactions were run using the SYBR Green Master Mix kit (Qiagen) with the four sets of primers as described. Data was analyzed using the ΔΔCT method by first normalizing KCNQ1 to GAPDH and then comparing the relative fold change to the KCNQ1-WT and shCT treatment group. All qRT-PCR experiments (except the dose-response curve in FIG. 8 and the time-course in FIG. 9) are the results of three independent experiments.

[0218] I_{Ks} Whole Cell Patch Clamp Electrophysiology: A standard whole-cell patch clamp technique was used to measure the slow delayed rectifier current, I_{Ks}, produced by KCNQ1-WT, -shIMM, and -variants at room temperature (22-24° C.) with the use of Axopatch 200B amplifier, Digidata 1440A system, and pCLAMP version 10.7 software (Axon Instruments; Sunnyvale, CA). The extracellular (bath) solution contained the following (mmol/L): 150 NaCl, 5.4 KCl, 1.8 CaCl₂, 1.0 MgCl₂, 1 Na-pyruvate, and 15 HEPES. The pH was adjusted to 7.4 with NaOH. The intracellular (pipette) solution contained the following (mmol/L): 20 KCl, 125 K-aspartate, 1 MgCl₂, 10 EGTA, 5 Mg-ATP, 5 HEPES, 2 Nae-phosphocreatine, and 2 Nae-GTP. The pH was adjusted to 7.2 with KOH (Al-Khatib et al., supra). Microelectrodes were pulled on a P-97 puller (Sutter Instruments; Novato, CA) and fire polished to a final resistance of 2-3MS2. The series resistance was compensated by 80-85%. Currents were filtered at 1 kHz and digitized at 5 kHz with an 8-pole Bessel filter. The voltage dependence of activation was determined using voltage-clamp protocols described in the description of FIGS. 10A-10C. Data were analyzed using Clampfit (Axon Instruments) and Excel (Microsoft; Redmond, WA) and fitted with GraphPad Prism 8 software (GraphPad; San Diego, CA).

[0219] Lentivirus Generation and Transduction of iPSC-CMs: For application of KCNQ1-SupRep to iPSC-CMs (or shCT as a treatment control), lentivirus was used. Lentiviral particles were generated from pCFP-C-shLenti-shKCNQ1-shIMM (KCNQ1-SupRep) and pGFP-C-shLenti-shCT (shCT), using the pPACKH1 HIV Lentivector Packaging kit (SBI System Biosciences; Palo Alto, CA). Lentiviral titers were quantified by two methods, including qRT-PCR (˜1×10¹¹ viral genomes/mL) to determine the total number of viral particles, and by transducing TSA201 cells in serial dilution to define the number of functional infectious particles (˜5×10⁸ infectious units/mL). Lentivirus was applied to iPSC-CMs at a multiplicity of infection (MOI) of 20-25 infectious units/cell (4,000-5,000 viral genomes/cell). After reaching at least day 30 post-induction of differentiation, iPSC-CMs derived from the healthy unrelated control, the four patients with LQT1, or two isogenic controls, were dissociated and plated into MATRIGEL®-coated 35 mm dishes with glass-bottom insets for FluoVolt™ (MatTek; Ashland, MA) or 8-chamber culture slides for immunofluorescence (CELLTREAT) as described above. After 24-48 hours of recovery, iPSC-CMs were left untreated or were transduced with lentiviral particles containing KCNQ1-SupRep or shCT treatment control at an MOI of 20-25. To increase transduction efficiency, Polybrene infection reagent (MilliporeSigma) was added during transduction to a final concentration of 8 μg/mL and the iPSC-CMs were centrifuged at 250 rcf for 1.5 hours at room temperature in the 35 mm dishes. After 24 hours post-transduction, the medium was exchanged for fresh maintenance medium, RPMI/B27-ins.

[0220] Immunofluorescence in iPSC-CMs: Immunofluorescence was conducted 7 days post-transduction of iPSC-CMs with lentiviral particles containing either KCNQ1-SupRep or shCT. Cells were fixed with 4% paraformaldehyde for 10 minutes and washed 3 times with PBS. Cells were blocked with 0.1% Triton X-100/5% donkey serum in PBS for 1 hour and incubated at 4° C. overnight using primary antibodies against cTnT (abcam; Cambridge, UK, ab45932), turboGFP for treatment with shCT (OriGene, TA150041) or eCFP for treatment with KCNQ1-SupRep (MyBioSource; San Diego, CA, MBS9401609), and KCNQ1 (Santa Cruz, sc-10646) at a 1:100 dilution each in blocking solution. Cells were washed 3 times for 15 minutes each with PBS-0.1% Triton X-100 and incubated in secondary ALEXA FLUOR PLUS® 488 donkey-anti-goat (Thermo, A32814), ALEXA FLUOR PLUS® 594 donkey-anti-mouse (Thermo, A32744), and ALEXA FLUOR PLUS® 647 donkey-anti-rabbit (Thermo, A32795) at a dilution of 1:250 each in blocking solution for 1 hour before washing again 3 times for 15 minutes each. DAPI counterstain was added during the first wash at a concentration of 1:2000 as before. VECTASHIELD® mounting media (Vector Labs) was diluted 1:10 in PBS and used as mounting solution, and images were acquired on a Zeiss LSM 780 confocal microscope using identical settings between images.

[0221] Voltage Dye Optical Action Potentials in iPSC-CMs: Voltage dye experiments were conducted between 3-7 days post-transduction of iPSC-CMs with lentiviral particles containing either KCNQ1-SupRep or shCT. Unrelated control cells and isogenic controls were not transduced with lentivirus, but rather were left untreated to provide an ideal normal baseline representing a “healthy” APD. On the day of imaging, iPSC-CMs were rinsed with pre-warmed (37° C.) HEPES-buffered Tyrode's solution (Alfa Aesar; Haverhill, MA). Using the FluoVolt™ Membrane Potential kit (Thermo), 0.125 μL FluoVolt™ dye and 1.25 μL PowerLoad were added to 0.5 mL Tyrode's solution for each 35 mm glass-bottom dish and incubated at 37° C. for 20 minutes. Excess dye was removed in three rinses with pre-warmed Tyrode's solution, and a final 2 mL Tyrode's solution was added to the iPSC-CMs for imaging. During imaging, the dishes were kept in a heated 37° C. stage-top chamber (Live Cell Instrument; Seoul, South Korea) with 5% CO₂. Using a Nikon Eclipse Ti light microscope (Nikon; Tokyo, Japan) under 40X-water objective magnification, optical action potentials were recorded in 20s fast time-lapse videos at a rate of 50 frames/sec (fps, 20 ms exposure time) with LED illumination at 5% power. iPSC-CMs were paced at 1 Hz (9 ms pulse duration, 25V) using a MyoPacer field stimulator (Ion Optix; Westwood, MA) to eliminate beat-rate dependent effects on the APD. Videos were focused on electrically-coupled syncytial areas of iPSC-CMs (clusters and monolayers) since these areas of cells best follow the pacing stimulus and produce the greatest signal-to-noise represented by large changes in fluorescence intensity (often ˜8-12%). For analysis, rectangular regions of interest were drawn over flashing areas of cells, and NIS-Elements software (Nikon) was used to quantify the fluorescence intensity over time within each region of interest, resulting in optical action potential traces. Using a custom in-house Excel-based program, traces were corrected for photobleaching and the amplitude was normalized as change in fluorescence divided by the baseline minimum florescence (ΔF/Fₘᵢₙ). In a semi-automated manner, common action potential parameters including APD₉₀, APD₅₀, amplitude, rise time, upstroke velocity, etc. were detected for each individual optical action potential and averaged across all beats within a second trace. The average of all beats within a 20 second trace represents a single data point. For representative traces, the maximum amplitude was further normalized to 1.0 to allow for accurate visualization of APD differences.

[0222] 3D iPSC-CM Organoid Culture, Immunofluorescence, and Optical Action Potentials: 3D-organoids were generated based on a protocol described elsewhere (Zimmerman et al., Circ. Res., 90:223-230 (2002)). Briefly, a spontaneously beating syncytial monolayer of iPSC-CMs from a patient with KCNQ1-Y171X was dissociated as described above. The pelleted iPSC-CMs were resuspended in a mixture of 80% ice cold undiluted MATRIGEL® (Corning) with 20% fetal bovine serum with 1 million iPSC-CMs per 15 μL. Aliquots of 15 μL (containing 1 million iPSC-CMs each) were transferred to an organoid embedding sheet (STEMCELL®) at 37° C. in a 5% CO₂ incubator for 30 minutes to solidify in a spherical shape. The organoids were then transferred to individual wells of a 24-well plate in RPMI/B27-ins. Organoids were allowed to mature for a minimum of 7 days before transducing with lentiviral shCT or KCNQ1-SupRep. After seven days post-transduction, organoids were fixed for immunofluorescence or live-imaged for electrophysiology using FluoVolt™ voltage dye. For immunofluorescence, organoids were rinsed with PBS, fixed in 4% paraformaldehyde for 10 minutes on ice, and washed three times with PBS. Organoids were suspended in Tissue-Plus™ optimal cutting temperature (O.C.T.) compound (Thermo), transferred to disposable base molds (Thermo), and frozen quickly on dry ice. Frozen organoids were cryosectioned and mounted on slides for imaging. Immunofluorescence was conducted as described above using 0.1% Triton X-100/5% goat serum in PBS as blocking solution, primary antibodies against cTnT (abcam, ab45932) and turboGFP for treatment with shCT (OriGene, TA150041) or eCFP for treatment with KCNQ1-SupRep (MyBioSource, MBS9401609) at a 1:100 dilution each. Secondary antibodies were ALEXA FLUOR PLUS® 488 goat-anti-mouse (Thermo, A32723) and ALEXA FLUOR PLUS® 594 goat-anti-rabbit (Thermo, A32740) at a dilution of 1:250 each. For FluoVolt™, the experiment was conducted as above using whole organoids instead of syncytial monolayers.

[0223] Statistical Analysis: GraphPad Prism 8 was used for all statistical analysis and to fit all data for figures. Individual data points are shown wherever practical along with the mean. Error bars represent standard deviation (S.D.) unless otherwise indicated in the figure legend. Specific statistical methods are indicated in each figure legend. Briefly, one-way ANOVA with post-hoc Tukey's or Dunnett's test for multiple comparisons was performed for comparisons among three or more groups as appropriate. An unpaired two-tailed student's t-test was performed to determine statistical significance between two groups when indicated. A p<0.05 was considered to be significant.

### Example 2—Generation of a KCNQ1-SupRep Gene Therapy Construct

[0224] To make KCNQ1-SupRep, four candidate KCNQ1 shRNAs (sh#1-4) in the pGFP-C-shLenti lentiviral backbone were purchased from OriGene, along with a non-targeting scrambled control shRNA (shCT, TABLE 3A). The KD efficiency of each KCNQ1 shRNA was determined by co-transfecting TSA201 cells with KCNQ1-WT and sh#1-4. Expression of KCNQ1 was measured by quantitative reverse transcription PCR (qRT-PCR, FIG. 5A) and confirmed by western blot (FIGS. 5A and 5B). Of the four shRNAs tested, sh#1, sh#2, and sh#4 all resulted in significant KD of KCNQ1 (mRNA: 69-78% KD, protein: 50-77% KD) with no statistically significant differences between the three shRNAs. Any of these shRNAs could in theory have been used as part of the final KCNQ1-SupRep gene therapy vector. To select a final shRNA from the three potential candidates, by raw average KD, KCNQ1 sh#4 provided the strongest KD of KCNQ1 on both the mRNA (78%, p=0.004) and protein (77%, p<0.004) levels. Further, at the time of selection, the KCNQ1 sh#4 target sequence (nucleotides c.1376-1404, exon 10-11 boundary) was assessed using the Genome Aggregation Database (gnomAD) and ClinVar, and was found to be devoid of both common genetic polymorphisms and all known pathogenic LQT1-causative mutations that may interfere with KD efficiency. KCNQ1 sh#4 therefore was selected for the final KCNQ1-SupRep and is referred to herein as “shKCNQ1.”

[0225] Four additional, custom-made shRNAs were subsequently tested (sh#5-sh#8; sequences in TABLE 3B). TSA201 cells were co-transfected with KCNQ1-WT and sh#5-sh#8) or non-targeting scrambled shRNA control (shCT). KCNQ1 expression normalized to GAPDH was measured by qRT-PCR. sh#5 had the strongest knockdown (95%) by raw value (FIG. 5C).

[0226] To create the replacement shRNA-immune version of KCNQ1, called KCNQ1-shIMM, ten synonymous variants were introduced into the WT KCNQ1 cDNA at the wobble base of each codon within shKCNQ1's target site, nucleotides c.1376-1404 (FIG. 6A). KCNQ1-shIMM was then cloned into the shKCNQ1-containing vector, pGFP-C-shLenti, downstream of the CMV promoter. In this step, the original GFP reporter (which remained the reporter for shCT) was exchanged for an internal ribosome entry site (IRES) with CFP. The final KCNQ1-SupRep gene therapy vector used in this in vitro study is illustrated in FIG. 6B.

### Example 3—KCNQ1-SupRep Gene Therapy Both Suppresses and Replaces KCNQ1-WT

[0227] To confirm that KCNQ1-shIMM is indeed immune to KD by shKCNQ1, TSA201 cells were co-transfected with KCNQ1-WT or KCNQ1-shIMM and shKCNQ1. The expression of KCNQ1-WT versus KCNQ1-shIMM was quantified using allele-specific qRT-PCR. Each sample was run in four separate reactions, using a unique set of allele-specific primers (TABLE 4), to quantify (1) total KCNQ1, (2) endogenous KCNQ1, which includes WT or variant-containing alleles, but excludes KCNQ1-shIMM, (3) KCNQ1-shIMM, and (4) GAPDH as a housekeeping control. Commercial primers were used to amplify total KCNQ1. For exclusive amplification of endogenous KCNQ1 or KCNQ1-shIMM, two forward primers were designed within the shKCNQ1 target site, one complementary to the WT sequence and the other complementary to the unique, modified sequence engineered to create KCNQ1-shIMM. A common reverse primer was used for both reactions, and a standard curve was used to correct for PCR amplification bias.

[0228] Compared to shCT, shKCNQ1 caused significant (87%) suppression of KCNQ1-WT (p<0.0001), but was unable to suppress KCNQ1-shIMM (p=0.997, FIG. 7A). Notably, there was no difference in the expression of KCNQ1-WT compared to KCNQ1-shIMM (p>0.9999), indicating that introduction of the synonymous variants in KCNQ1-shIMM did not disturb its expressivity as a result of uneven bias in the use of human codons. Next, KCNQ1-SupRep was co-transfected with KCNQ1-WT, which resulted in 52% suppression of KCNQ1-WT with 255% replacement of KCNQ1-shIMM (p<0.0001, FIG. 7A). The dual component KCNQ1-SupRep vector had less potent suppression compared to shKCNQ1 alone, but exhibited stronger expression of KCNQ1-shIMM than KCNQ1-shIMM alone. While the reason for this is unclear, varying amounts of KCNQ1-SupRep were transfected and shown to cause dose-dependent suppression and replacement, suggesting that KCNQ1-SupRep expression can be adjusted as needed (FIG. 8). Results obtained by qRT-PCR were confirmed by western blotting, which demonstrated that shKCNQ1 was able to significantly KD KCNQ1-WT (p=0.037) but not KCNQ1-shIMM (p=0.61, FIGS. 7A and 7B). As a safety metric for onset of the gene therapy, allele-specific qRT-PCR was used to measure the activation kinetics of KCNQ1-SupRep in a three day time course of TSA201 cells co-transfected with WT-KCNQ1 and shCT, shKCNQ1, KCNQ1-shIMM, or KCNQ1-SupRep. Compared to treatment with shCT, KCNQ1-SupRep caused reduction of KCNQ1-WT that was replaced with KCNQ1-shIMM, but the total KCNQ1 was not altered at any time during the three day onset, avoiding over- or under-expression (FIG. 9).

### Example 4—Selection of Patients with LQT1-Causative Variants in KCNQ1

[0229] Four patients with LQT1 hosting unique variants, KCNQ1-Y171X, KCNQ1-V254M, KCNQ1-I567S, and KCNQ1-A344A/spl were selected for this study. All four KCNQ1 variants were classified as pathogenic (LQT1-causative) by current American College of Medical Genetics guidelines (Richards et al., Genet. Med., 17:405-424 (2015)). This gene therapy pilot study therefore included a nonsense, premature truncation variant (KCNQ1-Y171X) producing haploinsufficiency in a patient with a mild phenotype, as well as two dominant-negative missense variants (KCNQ1-V254M and KCNQ1-I567S) and a synonymous splice variant (KCNQ1-A344A/spl) that causes skipping of exon 7 (Tsuji et al., J. Mol. Cell Cardiol., 24:662-669 (2007)), in three patients with a strong LQT1 phenotype including documented QTc greater than 500 ms, a positive history of LQTS-related symptoms (syncope, seizure, near drowning, sudden cardiac arrest), and a positive family history of LQTS-related symptoms (TABLE 2).

[0230] All four variants have been described elsewhere, though only KCNQ1-V254M and KCNQ1-A344A/spl have been characterized functionally as dominant-negative mutations (Tsjui et al., supra; Piippo et al., J. Am. Coll. Cardiol., 37:562-568 (2001); Wang et al., J. Cardiovasc. Electrophysiol., 10:817-826 (1999); and Choi et al., Circulation, 110:2119-2124 (2004)). Site-directed mutagenesis was used to introduce three of the four LQT1 patient variants (KCNQ1-Y171X, -V254M, and -I567S) into KCNQ1-WT to evaluate the ability of KCNQ1-SupRep to suppress and replace KCNQ1 variants in a mutation-independent manner. KCNQ1-A344A/spl was not included for heterologous expression studies in TSA201 cells since the KCNQ1-WT is a full length cDNA and does not contain the introns necessary to evaluate a splicing variant like KCNQ1-A344A/spl.

### Example 5—Validation of Function for KCNQ1-shIMM and KCNQ1 Pathogenic Variants

[0231] KCNQ1-WT and -shIMM, and LQT1-causative variants KCNQ1-Y171X, -V254M, and -I567S were co-transfected into TSA201 cells with the Kv7.1 channel (3-subunit, KCNE1. The resulting I_{Ks} current was measured by standard whole cell patch clamp. Representative traces are shown in FIG. 10A. Importantly, KCNQ1-shIMM produced robust I_{Ks} current with no significant difference from KCNQ1-WT (p=0.28, FIGS. 10B and 10C). All three LQT1 variants (KCNQ1-Y171X, -V254M, and -I567S) resulted in no functional I_{Ks} current beyond the minimal background ion channel activity of TSA201 cells, consistent with complete loss of function (FIGS. 10A-10C). Null current was expected for a nonsense variant like KCNQ1-Y171X and additionally for KCNQ1-V254M, whose null status was in concordance with data described elsewhere (Wang et al., supra). Total lack of current from KCNQ1-I567S was a novel finding, but was consistent with the patient's clinically definitive LQT1 and the fact that most LQT1-causative variants are missense variants.

[0232] To evaluate trafficking of KCNQ1 to the cell membrane, transfected TSA201 cells were assessed by immunofluorescence microscopy using a KCNQ1 antibody. Both KCNQ1-WT and KCNQ1-shIMM produced bright staining along the cell membrane, indicating that the synonymous variants in KCNQ1-shIMM did not interfere with correct trafficking (FIG. 11). Of the LQT1 variants, KCNQ1-Y171X produced no detectable protein as a result of premature truncation, while KCNQ1-V254M and KCNQ1-I567S exhibited normal cell membrane trafficking, though the overall expression of KCNQ1-I567S appeared to be decreased. Taken together, these results indicated that KCNQ1-shIMM has WT function and that KCNQ1-Y171X, -V254M, and -I567S are LQT1-causative variants with total loss of function.

### Example 6—KCNQ1-SupRep Gene Therapy Both Suppresses and Replaces KCNQ1 Variants in a Mutation-Independent Manner

[0233] To confirm that treatment with KCNQ1-SupRep gene therapy can suppress and replace LQT1-causative variants in a mutation-independent manner, TSA201 cells were co-transfected with the three KCNQ1 variants and shKCNQ1, KCNQ1-SupRep, or shCT control. All three LQT1-causative variants were suppressed by shKCNQ1, ranging from 87% to 93% KD relative to KCNQ1-WT as measured by allele-specific qRT-PCR (FIG. 12, top). While the suppression was visibly marked for each of the three variants, suppression by shKCNQ1 did not reach statistical significance for KCNQ1-Y171X and KCNQ1-I567S, presumably due to lower baseline expression of these variants. Despite not reaching statistical significance, it is noteworthy that very few mRNA transcripts were detectable in any sample (WT or variant) that was treated with shKCNQ1. Notably, KCNQ1-Y171X had substantially decreased expression at baseline, likely due to its premature stop codon and predicted subsequent nonsense-mediated decay of mRNA transcripts (Hug et al., Nucleic Acids Res., 44:1483-1495 (2016)).

[0234] Results obtained by qRT-PCR were confirmed by western blotting. KCNQ1-Y171X produced no detectable protein as a result of its premature truncation, while KCNQ1-V254M was suppressed by shKCNQ1, and KCNQ1-I567S had faint baseline expression that also was suppressed by shKCNQ1 (FIG. 12, bottom). Overall, KCNQ1-SupRep caused suppression and replacement of three LQT1-causative KCNQ1 variants, validating its ability to suppress and replace KCNQ1 in a mutation-independent manner.

### Example 7—Generation of iPSC-CMs from Four Patients with LQT1

[0235] From the 236 patients with LQT1 in the iPSC biorepository, four patients with distinct LQT1 mutations were selected to have their iPSCs differentiated into iPSC-CMs, in order to test the APD-shortening potential of this KCNQ1-SupRep gene therapy. A healthy unrelated individual was included as a control, and two isogenic controls were created by CRISPR-Cas9 correction of KCNQ1-V254M and KCNQ1-I567S, respectively. These isogenic controls served as the gold standard for a possible therapeutic cure, thereby providing a marker for the “ideal” rescue/normalization of the prolonged APD and indicating how close to this ideal did treatment with KCNQ1-SupRep gene therapy reach.

[0236] Dermal fibroblasts or peripheral blood mononuclear cells (PBMCs) were collected from each patient and were used to generate iPSCs. Standard quality control assays were performed on each iPSC line, including Sanger sequencing of the LQT1-causative variant, karyotyping, bright field morphology, and immunofluorescence microscopy for pluripotent markers including Tra-1-60, Nanog, SSEA-4, and Oct4 (FIGS. 13A-13D). Differentiation of iPSCs was induced by methods described elsewhere to generate spontaneously beating iPSC-CMs (Burridge et al., Nat. Methods, 11:855-860 (2014); and Mummery et al., Circ. Res., 111:344-358 (2012)). Since the cardiac APD is known to shorten as iPSC-CMs mature over time, all experiments were conducted at least 30 days after the induction of differentiation (Shaheen et al., Stem Cell Reports, 10:1879-1894 (2018)).

### Example 8—KCNQ1-SupRep Gene Therapy Increases KCNQ1 in LQT1 iPSC-CMs

[0237] To assess the ability of lentiviral KCNQ1-SupRep to transduce iPSC-CMs and increase WT KCNQ1 expression, unrelated control and LQT1 iPSC-CMs were transduced with lentiviral KCNQ1-SupRep or shCT and evaluated using immunofluorescence microscopy. Cardiac troponin T (cTnT) was used as a marker of cardiomyocytes. Antibodies targeting the lentiviral reporters (turboGFP for shCT or CFP for KCNQ1-SupRep) were used to identify transduced cells, and KCNQ1 was stained to visualize the effects of KCNQ1-SupRep on overall expression of KCNQ1. Results for KCNQ1-V254M iPSC-CMs (FIG. 14) and remaining unrelated control and LQT1 iPSC-CMs (FIGS. 15A-15D) showed high purity cardiomyocytes within the iPSC-CM cultures that had been evenly transduced with lentiviral KCNQ1-SupRep or shCT. At baseline in iPSC-CMs treated with shCT, KCNQ1 was only faintly detectable by confocal microscopy, whereas iPSC-CMs treated with KCNQ1-SupRep displayed robust staining for KCNQ1 (FIGS. 14 and 15A-15D). This suggests that in iPSC-CMs, treatment with KCNQ1-SupRep gene therapy drives substantial overexpression of KCNQ1-shIMM.

### Example 9—KCNQ1-SupRep Gene Therapy Shortens the Cardiac APD in LQT1 iPSC-CMs as Measured by FluoVolt′ Voltage Dye

[0238] Further studies were conducted to test whether treatment with KCNQ1-SupRep gene therapy is able to rescue the pathognomonic feature of LQT1 by shortening the pathologically prolonged APD. FluoVolt™ voltage dye was used to measure optical action potentials in iPSC-CMs derived from four patients with LQT1 (stemming from KCNQ1-Y171X, -V254M, 4567S, or -A344A/spl) treated with either the lentiviral shCT control or KCNQ1-SupRep gene therapy. The unrelated control was measured without any treatment as a measure for a healthy APD. All iPSC-CMs were paced at 1 Hz during recording to eliminate beat rate-dependent changes to the APD. Representative optical action potentials are shown in FIG. 16A. When treated with shCT, all LQT1 iPSC-CMs had significantly longer APD at 90% repolarization (APD₉₀) and three of the four also had significantly longer APD at 50% repolarization (APD₅₀) compared to untreated unrelated healthy control iPSC-CMs, validating the LQT1 iPSC-CMs as an in vitro model of LQT1.

[0239] A full summary of APD₉₀ and APD₅₀ values and APD shortening due to KCNQ1-SupRep is shown in TABLE 5. APD₉₀ and APD₅₀ values were assessed by one-way ANOVA with post-hoc Dunnett's test comparing each KCNQ1 variant treated with shCT or KCNQ1-SupRep to the untreated, unrelated control (brackets in TABLE 5). All four LQT1 iPSC-CMs treated with shCT had significantly longer APD₉₀ than the unrelated control, and two of the three had significantly longer APD₅₀ as well, confirming that these LQT1 lines display prolonged APD—the hallmark feature of LQT1. APD shortening due to KCNQ1-SupRep compared to treatment with shCT was then assessed by unpaired two-tailed student's t-tests at both the APD₉₀ and APD₅₀ levels separately for each variant. KCNQ1-SupRep resulted in statistically significant attenuation of both APD₉₀ and APD₅₀ in all four LQT1 iPSC-CMs (TABLE 5 and FIG. 16B). When treated with KCNQ1-SupRep, the APD₉₀ and APD₅₀ of both LQT1 lines shortened significantly. In particular, the APD₉₀ shortened by 117 ms in KCNQ1-Y171X, by 111 ms in KCNQ1-V254M, by 85 ms in KCNQ1-I567S, and by 210 ms in KCNQ1-A344A/spl (TABLE 5 and FIG. 16B).

[0240] To determine whether the observed APD shortening due to KCNQ1-SupRep represents complete rescue to WT or if the shorter APD values were incomplete or overcorrection, two CRISPR-Cas9 corrected isogenic controls were created from the KCNQ1-V254M and KCNQ1-A344A/spl parent LQT1 iPSC cell lines. When measured by FluoVolt™, and plotted against the shCT and KCNQ1-SupRep treatment data from FIG. 16B, both isogenic controls had significantly shorter APD₉₀ and APD₅₀ compared to their shCT-treated counterparts (FIGS. 17A and 17B).

[0241] Isogenic correction of KCNQ1-V254M shortened the APD₉₀ by 200 ms to 380±112 ms (n=58, p<0.0001), and isogenic correction of KCNQ1-A344A/spl shortened the APD₉₀ by 176 ms (n=57, p<0.001). A full summary of the APD₉₀ and APD₅₀ values for KCNQ1-V254M and KCNQ1-A344A/spl with isogenic controls is shown in TABLE 6. Comparing the shortened APD values of the KCNQ1-V254M and KCNQ1-A344A/spl iPSC-CMs treated with KCNQ1-SupRep gene therapy to the APD values of the isogenic controls, there was apparent variability in the actual degree of rescue. In KCNQ1-V254M, there was statistically significant incomplete shortening of the APD₉₀ and concomitant overcorrection of the APD₅₀ while in KCNQ1-A344A/spl the APD₉₀ had complete rescue with no significant difference, but did show overcorrection of the APD₅₀. Despite this variability, treatment with KCNQ1-SupRep gene therapy demonstrated the ability to completely rescue the prolonged action potential in LQT1 iPSC-CMs.

### Example 10—KCNQ1-SupRep Gene Therapy Shortens the Cardiac APD in 3D-Organoid Culture of LQT1 iPSC-CMs

[0242] To determine whether the APD-shortening ability of KCNQ1-SupRep is translatable from 2D syncytial monolayer iPSC-CM culture to a three-dimensional environment, LQT1 iPSC-CM 3D-organoids were generated from one of the four LQT1 variants using the KCNQ1-Y171X iPSC-CMs. The KCNQ1-Y171X iPSC-CMs were dissociated and embedded in a MATRIGEL® spheroid mold and allowed to reorganize naturally on the collagenous extracellular architecture to create a 3D-cardiac organoid (FIG. 18A). The organoids were treated with shCT or KCNQ1-SupRep, cryosectioned, and stained for immunofluorescence using cardiac troponin T (cTnT) to mark cardiomyocytes and the lentiviral reporters (turboGFP for shCT and CFP for KCNQ1-SupRep) to mark infected cells. Immunofluorescence revealed networks of cardiomyocytes and prominent staining of turboGFP and CFP, indicating even transduction by shCT and KCNQ1-SupRep (FIG. 18B). The APD of untreated and KCNQ1-SupRep treated organoids were assessed by FluoVolt′, revealing that KCNQ1-SupRep resulted in statistically significant shortening of the APD₉₀ and APD₅₀ (FIGS. 18C and 18D), and suggesting that KCNQ1-SupRep retained APD-shortening ability in a simple 3D organoid environment.

[0243] Taken together, the studies described above used two in vitro model systems to engineer and validate the APD-attenuating effect of a hybrid suppression-and-replacement gene therapy construct for LQTS, and LQT1 in particular. The results of these studies indicated that suppression-replacement gene therapy can be used to directly target the pathogenic substrate and ameliorating the resultant disease not only for LQT1 specifically, but also for LQTS in general, and perhaps for almost any sudden death-predisposing autosomal dominant genetic heart disease.

TABLE 2
Summary of subjects selected for generation of iPSCs for iPSC-CM studies

| | | Age at | | | | | | iPSC Source [symbol] |
|---|---|---|---|---|---|---|---|---|
| | | Sample | KCNQ1 | Average QT [symbol] | LQTS-Related | | | Generation |
| Subject | Sex | Collection | Variant(s) | (ms) [Range] | Symptoms | Family History | Treatment | Method |
| LQT1 #1 | Female | 41 | Y171X | No ECG | Asymptomatic | Daughter-JLNS | BB | PBMC: |
| | | | (c.513C > A) | Available | | | | Episomal |
| | | | | | | | | DNA |
| LQT1 #2 | Female | 28 | V254M | 512 [486- [symbol] ] | Near drowning | Mother-near | BB, ICD | Fibroblasts: |
| | | | (c.760G > A) | | (×2) | drowning | | Sendai |
| LQT1 #3 | Female | 59 | [symbol] | 488 [465-512] | Cardiogenic | Sister-syncope | BB, LCSD, | Fibroblasts [symbol] |
| | | | (c.1700T > G) | | syncope, ICD | while swimming (×2) | ICD | Episomal |
| | | | | | storm | Father-sudden | | DNA |
| | | | | | | death (80-years old) | | |
| LQT1 #4 | Male | 12 | A344A/spl | [symbol] [444-604] | Potential | Great-great aunt- | BB, LCSD | Fibroblasts: |
| | | | (c.1032G > A) | | cardiogenic | sudden death (30- | | Sendai |
| | | | | | syncope (×2) | years-old) | | |
| Unrelated | Małe | 47 | — | No ECG | Asymptomatic | — | — | Fibroblasts [symbol] |
| Control | | | | Available | | | | Sendai |

KCNQ1 variants are listed as the resulting change on the protein level with cDNA change in parenthesis.
(QT [symbol] ) Bazett-corrected QT interval;
(ECG) electrocardiogram;
(JLNS) Jervell and Lange-Nielsen syndrome;
(BB) beta-blocker;
(ICD) implantable cardioverter defibrillator;
(PBMC) peripheral blood mononuclear cells. [symbol]
indicates data missing or illegible when filed

TABLE 3A
KCNQ1 shRNA sequences

| | Target sequence | Hairpin | Antisense | KCNQ1 |
|---|---|---|---|---|
| ARNA | (sense)* | Loop | sequence | Location |
| shCT | GCACTACCAGAGCTAA | TCAAGAG | AGTACTATCTGAGTT | Non- |
| | CTCAGATAGTACT | | AGCTCTGGTAGTGC | targeting |
| KCNQ1 | CACTCATTCAGACCGC | TCAAGAG | ATAGCACCTCCATGC | Exon 8-9 |
| sh# 1 (DNA) | ATGGAGGTGCTAT | | GGTCTGAATGAGTG | |
| KCNQ1 | CACUCADUCAGACCGC | UCAAGAG | AUAGCACCUCCAUG | boundary |
| shi#1 (RNA) | AUGGAGGUGCUAU | | CGGUCUGAAUGAGUG | |
| KCNQ1 | TGACTCCTOGAGAGAA | TCAAGAG | GACTGTGAGCATCTT | Exon 10 |
| sh#2 (DNA) | GATGCTCACAGTC | | CTCTCCAGGAGTCA | |
| KCNQ1 | UGACUCCUGGAGAGAA | UCAAGAG | GACUGUGAGCAUCUU | |
| sh#2 (RNA) | GAUGCUCACAGUC | | CUCUCCAGGAGUCA | |
| KCNQ1 | AGTTCTGTGAAACGCT | TCAAGAG | GTGTAACCACTGGAG | Intron 1 |
| sh#3 (DNA) | CCAGTGGTTACAC | | CGTTICACAGAACT | |
| KCNQ1 | ACGGCTATGACAGTTC | UCAAGAG | GUGUAACCACUGGAG | |
| sh#3 (RNA) | TGTAAGGAAGAGC | | CGUUUCACAGAACU | |
| KCNQ1 | ACGGCTATGACAGTTC | TCAAGAG | GCTCTTCCTTACAGAA | Exon |
| sh#4 (DNA) | TGTAAGGAAGAGC | | CTGTCATAGCCGT | 10-11 |
| KCNQ1 | ACGGCUAUGACAGUUC | UCAAGAG | GCUCUUCCUUACAGA | boundary |
| sh#4 (RNA) | UGUAAGGAAGAGC | | ACUGUCAUAGCCGU | |

*shCT = SEQ ID NO: 11
KCNQ1 sh#1 (DNA) = SEQ ID NO: 12; KCNQ1 sh#1 (RNA) = SEQ ID NO: 16
KCNQ1 sh#2 (DNA) = SEQ ID NO: 13: KCNQ1 sh#2 (RNA) = SEQ ID NO: 17
KCNQ1 sb#3 (DNA) = SEQ ID NO: 14; KCNQ1 sh#3 (RNA) = SEQ ID NO: 18
KCNQ1 sh#4 (DNA) = SEQ ID NO: 15; KCNQ1 sh#4 (RNA) = SEQ ID NO: 19

TABLE 3B
KCNQ1 shRNA sequences

| | Target sequence | Hairpin | Antisense | KCNQ1 |
|---|---|---|---|---|
| shRNA | (sense)* | Loop | sequence | Location |
| KCNQ1 | GTTCAAGCTGGACAA | TCAAGAG | TCACCCCATTGTCTT | Exon 10 |
| Sh#5 (DNA) | AGACAATGGGGTGA | | TGTCCAGCTTGAAC | |
| KCNQ1 | GUUCAAGCUGGACAA | UCAAGAG | UCACCCCAUUGUCUU | |
| sh#5 (RNA) | AGACAAUGGGGUGA | | UGUCCAGCUUGAAC | |
| KCNQ1 | GACAGTTCTGTAAGG | TCAAGAG | AGTGTTGGGCTCTTC | Exon |
| sh#6 (DNA) | AAGAGCCCAACACT | | CTTACAGAACTGTC | 10-11 |
| KCNQ1 | GACAGUUCUGUAAGG | UCAAGAG | AGUGUUGGGCUCUUC | |
| sh#6 (RNA) | AAGAGCCCAACACU | | CUUACAGAACUGUC | |
| KCNQ1 | AGACCATCGCCTCCT | TCAAGAG | AAAGACAGAGAACCA | Exon 7 |
| sh#7 (DNA) | GCTTCTCTGTCTTT | | GGAGGCGATGGTCT | |
| KCNQ1 | AGACCAUCGCCUCCU | UCAAGAG | AAAGACAGAGAAGCA | |
| sh#7 (RNA) | GCGUCUCUGUCUUU | | GGAGGCGAUGGUCG | |
| KCNQ1 | CCCAAACCCAAGAAG | TCAAGAG | TTTACCACCACAGAC | Exon |
| sh# 8 (DNA) | TCTGTGGTGGTAAA | | TTCTTGGGTTTGGG | 9-10 |
| KCNQ1 | CGCAAACCCAAGAAG | UCAAGAG | UUUACCACCACAGAC | |
| sh#8 (RNA) | UCUGUGGUGGUAAA | | UUCUUGGGUUUGGG | |

*KCNQ1 sh#5 (DNA) = SEQ ID NO: 36, KCNQ1 sh#5 (RNA) = SEQ ID NO: 40
KCNQ1 sh#6 (DNA) = SEQ ID NO: 37; KCNQ1 sh#6 (RNA) = SEQ ID NO: 41
KCNQ1 sh#7 (DNA) = SEQ ID NO: 38: KCNQ1 sh#7 (RNA) = SEQ ID NO: 42
KCNQ1 sh#8 (DNA) = SEQ ID NO: 39; KCNQ1 sh#8 (RNA) = SEQ ID NO: 43

TABLE 4
qRT-PCR primers

| | | Forward | Reverse | |
|---|---|---|---|---|
| Primer | | Primer | Primer | Location |
| Set | Amplifies: | (5′→3′) | (5′→3′) | (FW, RV) |
| Total | KCNQ1-ALL | GAGCCACAC | GGAGAGAAGAT | Exon 9, |
| | | TCTGCTGTC | GCTCACAGTC | Exon 10 |
| | | (SEQ ID | (SEQ ID | |
| | | NO: 20) | NO: 21) | |
| Allele- | KCNQ1-WT | GACGGCTAT | TGTGAGATGTG | Exon 10, |
| Specific | KCNQ1- | GACAGTTCT | GGTGATGGGTG | Exon 11 |
| Endo- | variants | GTAAGGAAG | TCAGCAGA | |
| genous | | AGC | (SEQ ID | |
| | | (SEQ ID | NO: 23) | |
| | | NO: 22) | | |
| Allele- | KCNQ1- | GATGGATAC | TGTGAGATGTG | Exon 10, |
| Specific | shIMM | GATAGCTCC | GGTGATGGGTG | Exon 11 |
| shIMM | | GTCAGAAAA | TCAGCAGA | |
| | | AGT | (SEQ ID | |
| | | (SEQ ID | NO: 23) | |
| | | NO: 24) | | |
| GAPDH | GAPDH- | ACATCGCTC | TGTAGTTGAGG | Exon 2, |
| | ALL | AGACACCAT | TCAATGAAGGG | Exon 3 |
| | | G | (SEQ ID | |
| | | (SBQ ID | NO: 26) | |
| | | NO: 25) | | |

[symbol]

TABLE 5
Summary of FIGS. 16A and 16B FluoVolt ™ optical action potential data

| | | | | p-value | | | | p-value |
|---|---|---|---|---|---|---|---|---|
| | shCT | SupRep | [symbol] PD₉₀ | (SupRep | shCT | SupRep | [symbol] APD [symbol] | (SupRep |
| iPSC-CMS | ADP₉₀ (ms) | APD₉₀ (ms) | (ms) | v. shCT) | APD [symbol] (ms) | APD [symbol] (ms) | (ms) | v. shCT) |
| Unrelated | [Untreated] | — | — | — | (Untreated] | — | — | — |
| Control | 332 ± 53 (n = 50) | | | | 184 ± 23 (n = [symbol] ) | | | |
| KCNQ1-Y171X | 585 ± 77 (n = 52) | 468 ± 43 (n = 63) | −117 | p < 0.0001**** | 230 ± 26 (n = [symbol] ) | 181 ± 23 (n = 63) | −49 | p < 0.0001**** |
| | p < 0.0001**** | p < 0.0001**** | | | p = 0.0015** | p = 0.9997 [symbol] | | |
| KCNQ1-V254M | 580 ± [symbol] (n = 42) | 469 ± 89 (n = 55) | −111 | p < 0.0001**** | 353 ± 112 (n = 42) | 224 ± 96 (n = 55) | −129 | p < 0.0001**** |
| | p < 0.0001**** | p < 0.0001**** | | | p < 0.0001**** | p = 0.0073** | | |
| KCNQ1-I567S | 452 ± 72 (n = 45) | 367 ± 60 (n = 45) | −85 | p <0 .0001**** | 184 ± 24 (n = 45) | 149 ± 24 (n = 45) | −35 | p < 0.0001**** |
| | p < 0.0001**** | p = [symbol] | | | p > 0.9999 [symbol] | p < 0.0424* | | |
| KCNQ1- | 553 ± [symbol] | 343 ± 133 | −230 | p < 0.0001**** | 350 ± 94 (n = 61) | 142 ± 47 (n = 63) | −208 | p < 0.0001**** |
| A344A/spl | (n = 61) | (n = 63) | | | p < 0.0001**** | p < 0.0033** | | |
| | p < 0.0001**** | p < 0.9757 [symbol] | | | | | | |

APD₉₀ and APD [symbol] values were assessed by one-way ANOVA with post-hoc Dunnett's test to compare each KCNQ1 variant treated with shCT or KCNQ1-SupRep to the untreated, unrelated control (all p-values except those listed in the SupRep v. shCT columns).
All four LQT1 iPSC-CMs treated with shCT had significantly longer APD₉₀ than the unrelated control, and three of the four had significantly longer APD [symbol] as well.
APD shortening due to KCNQ1-SupRep compared to treatment with shCT was assessed by unpaired two-tailed student's [symbol] -tests at both the APD₉₀ and APD [symbol] levels separately for each variant.
KCNQ1-SupRep resulted in statistically significant attenuation of both APD₉₀ and APD [symbol] in all four LQT1 iPSC-CMs.
*p < 0.05, **p < 0.01, ***p < 0.001, ****p < 0.0001, (n.s.) not significant. [symbol]
indicates data missing or illegible when filed

[symbol]

TABLE 6
Summary of FIGS. 17A and 178 FluoVolt ™ optical action potential data

| | | | | p-value | | | | p-value |
|---|---|---|---|---|---|---|---|---|
| | shCT | SupRep | AAPD [symbol] | (SupRep | shCT | SupRep | AAPD [symbol] | (SupRep |
| IPSC-CMS | ADP [symbol] (ms) | APD [symbol] (ms) | (ms) | v. shCT) | APD [symbol] (ms) | APD [symbol] (ms) | (ms) | v. shCT) |
| KCNQ1-V254M | [symbol] ± 56 (n = 42) | 469 ± 89 (n = 55) | −111 | p < 0.0001**** | 353 ± 12 | 224 ± 96 | −129 | p < 0.0001**** |
| | p < 0.0001**** | p < 0.0001**** | | | (n = 42) | (n = 55) | | |
| | | | | | p < 0.0001**** | p = 0.0303* | | |
| isogenic Control | (Untreated) | — | — | — | (Untreated) | — | — | — |
| for V254M | 380 ± 112 | | | | 267 ± 60 | | | |
| | (n = 58) | | | | (n = [symbol] ) | | | |
| KONQ1- | [symbol] ± 98 (0 = 61) | 343 ± 133 | −210 | p < 0.0001**** | 350 ± 94 | 142 ± 47 | −208 | p < 0.0001**** |
| A344A/spl | p < 0.0001**** | (n = 63) | | | (n = 61) | (n = 63) | | |
| | | p = 0.2450 [symbol] | | | p < 0.0001*** | p < 0.0001**** | | |
| isogenic Control | (Untreated) | — | — | — | (Untreated) | — | — | — |
| for A344A/spl | 377 ± 105 | | | | 231 ± 68 | | | |
| | (n = 57) | | | | (n = 57) | | | |

APD [symbol] and APD [symbol] values for KCNQ1-V254M and KCNQ1-A344A/spl were compared to their respective isogenie controls by one-way ANOVA with post-hoc Tukey's test (all p-values except those listed in the SupRep v. shCT columns).
The APD values for the isogenic controls served as a benchmark for the “ideal” rescue of APD for each of the two variants, KCNQ1-V254M and KCNQ1-A344A/spl.
Treatment of the LQT1 iPSC-CMs with KCNQ1-SupRep resulted in shortening of the APD for each set of LQT1 iPSC-CMs tested, bringing the APD closer to the respective isogenic control for each variant.
*p < 0.05, **p < 0.01, ***p < 0.001, ****p < 0.0001, (n.s.) not significant. [symbol]
indicates data missing or illegible when filed

### Example 11—Restoring Normal Cellular Electrophysiology in a Transgenic LQT1 Rabbit Model

[0246] Experiments are conducted to evaluate the effect of AAV9-based gene delivery of KCNQ1-SupRep gene therapy to reverse QT/APD-prolongation and arrhythmia susceptibility in an established humanized rabbit model of LQT1 with an LQT1-causing human pathogenic KCNQ1-p.Y315S variant. Animals are treated with AAV9-KCNQ1-SupRep for whole animal arrhythmia phenotyping and molecular/cellular electrophysiological phenotyping in acutely isolated rabbit ventricular CMs, to determine the effects of AAV9-mediated delivery of the KCNQ1-SupRep vector on restoring normal molecular, cellular, whole heart, and whole animal electrophysiological phenotypes and preventing ventricular arrhythmias. Rabbits and humans share similar K+ currents underlying cardiac repolarization (Nerbonne, J. Physiol., 525(2):285-298 (2000)), such that transgenic rabbit models are useful for investigating human arrhythmogenic diseases with impaired repolarization. The transgenic LQT1 and LQT2 rabbit models for use in these studies selectively over-express either loss-of-function, dominant-negative pore-localizing variants of human KCNQ1 (LQT1, KCNQ1-Y315S, loss of I_{Ks}) or KCNH2 (LQT2, KCNH2-G628S, loss of I_{Kr}) in the heart, respectively. These LQT1 and LQT2 rabbits mimic the human LQTS phenotype with QT-prolongation, spontaneous Torsade-de-Pointes (TdP) ventricular tachycardia, and SCD (FIGS. 19A-19F) (Brunner et al., J. Clin. Invest., 118:2246-2259 (2008); and Odening et al., Heart Rhythm, 9:823-832 (2012)). The KCNQ1-Y315S and KCNH2-G628S mutations are expressed in the rabbit hearts under control of the rabbit beta-myosin heavy chain (β-MyHC) promoter (FIG. 19A) to produce LQT1 and LQT2 phenotypes in the rabbit models, respectively. The rabbits exhibit significant prolongation of QT (FIGS. 19B and 19C), a propensity to develop spontaneous torsades de pointes (TdP) following treatment with ostradiol (FIG. 19D), and action potential duration (FIG. 19E) due to elimination of I_{Ks} or I_{Kr} currents, respectively (FIG. 19F). Detailed methods for generation and phenotypic assessment of the rabbits are described elsewhere (Brunner et al., supra). Given the similarity to the human LQTS phenotype, these models have unique advantages for investigating novel LQTS therapies in vivo and on the whole heart level.

[0247] To focus on treatment of the LQT1 transgenic rabbit model, the QTc/APD-attenuating effects of AAV9-KCNQ1-SupRep are investigated in detail in vivo, ex vivo (whole-heart), and in vitro (rabbit cardiomyocyte) in the LQT1 rabbits. The anti-arrhythmic properties of AAV9-KCNQ1-SupRep are assessed ex vivo in Langendorff-perfused LQT1 rabbit hearts in which arrhythmias are facilitated by AV-node ablation and hypokalemia, to evaluate the ability of KCNQ1SupRep gene therapy delivery to reverse the pathogenic LQT1 phenotype in KCNQ1-Y315S transgenic rabbits. Following protocols described elsewhere (Odening et al., Eur Heart J., 40:842-853 (2019)), all experiments are performed in female (f) and male (m) adult rabbits (aged 4-7 months). For in vivo experiments (surgery, surface ECG), rabbits are anesthetized with S-ketamine and xylazine (12.5 mg/kg/3.5 mg/kg IM, followed by IV infusion). After surgery, analgetic therapy with buprenorphine is maintained for 3 days. Beating heart excision (for action potential recordings and arrhythmia assessments in Langendorff-perfused hearts, and cellular patch clamping) are performed after additional injection of heparin (500 IE IV) and thiopental-sodium (40 mg/kg IV). In vivo cardiac phenotyping is performed using surface ECG35 (Odening et al. 2019, supra) on KCNQ1-Y315S transgenic rabbits after AAV9 delivery of KCNQ1-SupRep or AAV9-sham vectors. Similarly, molecular and cellular electrophysiological characterization of AAV9-KCNQ1-SupRep and AAV9-shCT treated rabbits is performed as described elsewhere (Brunner et al., supra; and Odening et al. 2019, supra).

[0248] The transgenic LQT1 rabbit expresses two endogenous wild-type rabbit KCNQ1 alleles and a single transgenic human KCNQ1 mutant (p.Y315S) allele. The human and rabbit KCNQ1 cDNA are 73% homologous overall. shRNAs having 100% homology between rabbit and human KCNQ1 (such that both rabbit and human alleles are suppressed simultaneously in the LQT1 rabbit model) are designed and tested, and virus particles are produced.

[0249] Analogous experiments are carried out using one or more KCNH2-SupRep constructs in a LQT2 rabbit model.

[0250] AAV9-KCNQ1-SupRep gene transfer in isolated LQT1 CMs: The functionality of the AAV9-KCNQ1-SupRep gene transfer is tested in isolated ventricular CMs from LQT1 rabbits before the constructs are tested in LQT1 rabbits in vivo. In particular, left ventricular CMs are obtained from the hearts of transgenic LQT1 rabbits (n=5) by standard collagenase digestion (Brunner et al., supra; and Odening et al. 2019, supra). CMs are maintained in culture for 48 hours, and half of the cell cultures are incubated with AAV9-KCNQ1-SupRep. Functional consequences on cellular APD and I_{Ks} current densities are then analyzed (compared to sham-treated LQT1 CMs) using standard voltage and current mode patch clamping (see below).

[0251] AAV9-KCNQ1-SupRep gene transfer in vivo via lateral thoracotomy: For in vivo gene transfer, lateral thoracotomy is performed and AAV9-KCNQ1-SupRep or AAV9-shCT constructs are painted on the epicardial surface of both ventricles and both atria.

[0252] Adult LQT1 rabbits of both sexes (LQT1-KCNQ1-SupRep and LQT1-AAV9-shCT controls, split into groups and used for in vivo and ex vivo whole heart experiments or cellular electrophysiology) are anesthetized with S-ketamine and xylazine. Rabbits are intubated to guarantee proper ventilation during open chest surgery, and left lateral thoracotomy is performed. After thorough painting of AAV9-KCNQ1-SupRep or AAV9-shCT on the surface of the whole heart, the chest is closed and the rabbit is awakened. After at least 1-2 weeks of post-surgery recovery, experiments are performed to investigate the electrophysiological consequences of the KCNQ1-SupRep gene therapy in LQT1 rabbits.

[0253] 12-lead ECG recording in vivo: Adult LQT1-KCNQ1-SupRep (female and male) and LQT1-AAV9-shCT sham-controls (female and male) rabbits are subjected to conventional 12-lead surface ECG recordings to determine the effect of KCNQ1-SupRep gene therapy on restoring normal QT duration and diminishing pro-arrhythmic markers. ECG is performed under general anesthesia with S-ketamine and xylazine, as this anesthetic regimen does not impact cardiac repolarization (Odening et al., Am. J. Physiol. Heart Circ. Physiol., 295:H2264-2272 (2008)). KCNQ1 gene-transfer mediated changes in QT, heart rate corrected QT, and Tpeak-Tend (Tp-e) and beat-to-beat variability of QT (short term variability of the QT interval; STVQT) are calculated to assess changes in spatial and temporal heterogeneity of repolarization.

[0254] Monophasic Action Potential (MAP) measurements in Langendorff-perfused hearts ex vivo: MAP is performed as described elsewhere (Odening et al. 2019, supra). Briefly, adult LQT1-KCNQ1-SupRep (female and male) and LQT1-AAV9-shCT sham-control (female and male) rabbits are anesthetized as described above. Following euthanasia with thiopental-sodium (40 mg/kg) IV, hearts are excised rapidly, mounted on a Langendorff-perfusion set-up (IH5, Hugo Sachs Electronic-Harvard Apparatus), retrogradely perfused via the cannulated aorta ascendens with warm (37° C.), pre-oxygenated (95% 02 and 5% CO₂), modified Krebs-Henseleit solution at the constant flow rate of 50 mL/minute. Action potential duration at 90%, 75%, and 30% of repolarization (APD90, 75, 30) is assessed, and AP triangulation (APD90-APD30) and APD restitution (based on APD90 values at 2 and 4 Hz stimulation) are calculated for each LV region.

[0255] Arrhythmia experiments in Langendorff-perfused hearts ex vivo: The anti-arrhythmic effect of KCNQ1-SupRep gene therapy is assessed ex vivo in AV-node-ablated Langendorff perfused LQT1-KCNQ1-SupRep (female and male) and LQT1-AAV9-shCT (female and male) hearts, beating spontaneously with stable ventricular escape rhythm (VER) at a constant rate of around 60-80 beats/minute (Hornyik et al., Br. J. Pharmacol., 177:3744-3759 (2020)). After 10 minutes of baseline (arrhythmia-free) recording, hearts are perfused with 2 mM low K⁺ containing KH solution (10 minutes) to provoke arrhythmias. In a second step, 10 μM of IK1-blocker BaCl₂ are added to the 2 mM low K⁺ containing KH solution and perfused (10 minutes) to reduce repolarization reserve and further increase susceptibility to arrhythmia formation. ECGs are recorded continuously and the duration (%) and incidence (average number of events) of arrhythmias are measured off-line. Arrhythmias are defined as ventricular extra beats (VEB), bigeminy, ventricular tachycardia (VT), and ventricular fibrillation (VF). Arrhythmia rates are very high (in the range of 60-80%) in LQT1 hearts, while even in low K⁺ KH combined with BaCl₂, no serious ventricular arrhythmias occur in normal wild type hearts (Hornyik et al., supra).

[0256] Electrophysiological recording in rabbit CMs: Left ventricular CMs are obtained from the hearts of KCNQ1SupRep-treated transgenic LQT1 rabbits and sham control transgenic LQT1 rabbits by standard collagenase digestion (Brunner et al., supra; and Odening et al. 2019, supra). Whole cell currents (I_{Ks}, I_{Kr}, Ito, and IK1) and action potentials are recorded using Axopatch 200B patch clamp amplifier (Molecular Devices), digitized at a sampling frequency of 10 kHz with Digidata 1440A interface and acquired with pCLAMP software as described elsewhere (Odening et al., 2019, supra).

[0257] Data interpretation: For normally distributed values, Student's t test (unpaired) is used to compare the means of 2 groups, and Mann-Whitney and Wilcoxon matched pairs test are used for values not normally distributed. Fisher's exact test is used for categorical variables such as arrhythmia incidences. In I-V-curves, differences are assessed using repeated-measure ANOVA, complemented by Bonferroni post-hoc analyses. Cellular electrophysiology data are evaluated using pClamp 9.0 and Origin 7.0 software, and results are given as mean±SEM. All other analyses are performed with Prism 5.01 for Windows (Graph-Pad), and their data are presented as mean±SD, with n indicating the number of experiments/animals, tests being 2-tailed, and p<0.05 considered significant. All experiments in the rabbits are performed and analyzed in a blinded fashion.

### Example 12—Materials and Methods for LQT2 SupRep

[0258] Cloning of KCNH2-SupRep: WT KCNH2 cDNA (NM_000238.3) was subcloned into pIRES2-EGFP (Clontech; Mountain View, CA) to generate pIRES2-EGFP-KCNH2-WT. The p.G604S and p.N633S variants in pIRES2-EGFP-KCNH2-WT were produced by GenScript (Piscataway, NJ). DNA Sanger sequencing was used to confirm vector integrity. Five custom-designed KCNH2 shRNAs (sh#1-5) were ordered from OriGene (Rockville, MD) in the pGFP-C-shLenti backbone along with a non-targeting scrambled shRNA control (shCT). For the final KCNH2-SupRep gene therapy vector, KCNH2 sh#4 was selected as the lead candidate and is referred to as shKCNH2. A DNA fragment containing ten synonymous variants within the KCNH2 sh#4 (shKCNQ2) target sequence of the KCNH2-WT cDNA: c.2694C>T, c.2697G>C, c.2700G>A, c.2703G>A, c.2706A>T, c.2709G>C, c.2712G>A, c.2715G>C, c.2718G>C, and c.2721C>G (KCNH2: p.D898D, p.T899T, p.E900E, p.Q901Q, p.P902P, p.G903G, p.E904E, p.V905V, p.59065, and p.A907A, respectively) was synthesized and cloned into pIRES2-EGFP-KCNH2-WT to create KCNH2-shIMM (pIRES2-EGFP-KCNH2-shIMM) (GenScript; Piscataway, NJ). KCNH2-shIMM was subcloned into the pGFP-C-shLenti backbone containing shKCNH2 to create the final KCNH2-SupRep.

[0259] KCNH2 mammalian expression vectors for patch clamp experiments: Wild-type KCNH2 cDNA was subcloned into pIRES2-EGFP (Clontech, Mountain View, CA) and AAV-P2A CTnC-EGFP (GenScript; Piscataway, NJ) to produce KCNH2-pIRES2-EGFP and KCNH2-AAV-P2A CTnC-EGFP.

[0260] TSA 201 and H9C2 cell culture and transfection for patch clamp experiments: TSA 201 and H9C2 cells were cultured in Dulbecco's Modification of Eagle's Medium (DMEM) supplemented with 10% Fetal Bovine Serum (FBS), 1.0% L-glutamine, and 1.2% penicillin/streptomycin solution in a 5% CO₂ incubator at 37° C. Heterologous expression of KCNH2 was accomplished by using 5 μl or 3 μl of Lipofectamine (Invitrogen) to transfect 1.0 μg of pIRES2-KCNH2-EGFP along with 1.0 μg KCNE2-pIRES2-dsRed2 or 1.0 μg KCNH2-AAV-P2A CTnC-EGFP in OPTI-MEM media. The transfected cells were incubated for 48 hours before electrophysiological experiments.

[0261] Electrophysiological measurements: A standard whole-cell patch clamp technique was used to measure pIRES2-KCNH2-WT-EGFP with KCNE2-pIRES2-dsRed2 and KCNH2-AAV-P2A CTnC-EGFP currents at room temperature (RT) using an Axopatch 200B amplifier, Digidata 1440A, and pclamp version 10.4 software (Axon Instruments, Sunnyvale, CA). The extracellular (bath) solution contained (mmol/L): 150 NaCl, 5.4 KCl, 1.8 CaCl₂, 1 MgCl₂, 1 Na-Pyruvate, and 15 HEPES. The pH was adjusted to 7.4 with NaOH. The intracellular (pipette) solution contained (mmol/L): 150 KCl, 5 NaCl, 2 CaCl₂, 5 EGTA, 5 MgATP, 10 HEPES, pH adjusted to 7.2 with KOH. Microelectrodes were fire polished to a final resistance of 2-3 MS2 after being pulled using a P-97 puller (Sutter Instruments, Novato, CA). Series resistance was compensated by 80-85%. Currents were filtered at 1 kHz and digitized at 5 kHz with an eight-pole Bessel filter. The voltage dependence of activation was determined using voltage-clamp protocols described for FIGS. 30A and 31A. Data were analyzed using Clampfit (Axon Instruments, Sunnyvale, CA), Excel (Microsoft, Redmond, WA) and graphed with GraphPad Prism 8.3 (GraphPad Software, San Diego, CA).

[0262] LQT2 Patient Selection for iPSC Generation: All patients were evaluated by a single genetic cardiologist and LQTS specialist. Dermal fibroblasts and peripheral blood mononuclear cells (PBMCs) were collected by 4 mm skin punch biopsy and blood sample, respectively. Samples were obtained from 212 patients with LQT2. For this study, two LQT2 patients (13-year-old male and 12-year-old female) with two different LQT2-causative missense variants were selected based on a strong LQT2 phenotype defined as at least one ECG with QTc greater than 500 ms, positive history of LQTS-related symptoms (syncope, seizure, sudden cardiac arrest), and positive family history of LQTS-related symptoms (TABLE 7). PBMCs or fibroblasts were reprogrammed into induced pluripotent stem cells (iPSCs) by Sendai virus transduction using the Cytotune 2.0 reprogramming kit. Colonies were picked within 21 days post infection with Yamanaka factors. For each variant line, two representative clones were generated, characterized, and analyzed for quality control as described elsewhere (O'Hare et al., Circ Genom Precis Med. 13:466-475 (2020)). Karyotyping for each of the patient-specific iPSC clones was completed by the Mayo Clinic Cytogenetics Laboratory, and all mutant iPSC clones that were tested demonstrated normal karyotypes (FIG. 20A). Genomic DNA was isolated from each iPSC clone (FIG. 20B) and the variant's presence and integrity of the rest of the KCNH2 sequence was confirmed by Sanger sequencing (FIG. 20C). All iPSC clones were confirmed to express Nanog (ThermoFisher PA1-097X) and SSEA-4 (ThermoFisher, MA1-021) pluripotent markers (FIG. 21). All iPSCs were cultured in mTeSR-Plus medium (STEMCELL®) supplemented with 1% antibiotic/antimycotic solution on MATRIGEL®-coated (Corning; Corning, NY) 6 cm culture dishes in a 5% CO₂ incubator at 37° C. At 85% confluence, iPSCs were passaged using ReLeSR (STEMCELL®).

[0263] iPSC-CM Culture, Differentiation, and Dissociation: iPSCs were differentiated into cardiomyocytes (CMs) after reaching −85% confluency, using a protocol described elsewhere (Burridge et al., supra; and Mummery et al., supra). On day 0, differentiation was initiated by changing the culture medium from mTeSR-Plus to RPMI 1640 GlutaMAX plus 25 mM HEPES supplemented with B27-minus insulin (RPMI/B27-ins; Thermo) containing 5 μM CHIR99021 (MilliporeSigma; St. Louis, MO). After 48 hours (day 2), the medium was changed to RPMI/B27-ins containing 5 μM IWP-2 (MilliporeSigma). On day 4, the medium was changed back to the RPMI/B27-ins maintenance medium. Spontaneous beating began on days 6-7. From days 10-16, iPSC-CMs were cultured in selection medium containing 500 μg/ml of recombinant human albumin, 217 μg/ml of L-ascorbic acid 2-phosphate, and 5 mM of DL-Lactate in RPMI 1640 medium (without glucose). Post selection, iPSC-CMs were dissociated enzymatically using a STEMdiff cardiomyocyte dissociation kit (STEMCELL) as described elsewhere (Dotzler et al., Circulation. 143:1411-1425 (2021)). After 24 hours, cells were maintained in RPMI/B27-ins medium. For all experiments, cells were used after at least 30 days post differentiation.

[0264] Generation of CRISPR-Cas9 Corrected Isogenic Control iPSCs: Genome editing of iPSC cell lines was contracted through Applied Stem Cell (Milpitas, CA). Using CRISPR-Cas9 technology, isogenic “variant corrected” control iPSC cell lines were created for both LQT2 patient cell lines (p.G604S and p.N633S). Briefly, two guide RNAs (gRNAs) for each variant line were designed and validated in vivo. Based on specificity score, cutting efficiency, and off-target profile, one candidate gRNA was chosen for genome editing on each patient iPSC line. A single-stranded oligodeoxynucleotide (ssODN) was designed to be used as a repair template, and a silent mutation in the gRNA binding site was introduced into the ssODN to prevent re-cutting. The LQT2 patient iPSC line was transfected with the gRNA construct and ssODN using a Neon system, and transfected iPSCs were subjected to puromycin selection. Single-cell colonies were picked for genotyping, and two clones with variant correction were expanded for further studies.

[0265] TSA201 Cell Culture and Transfection for Western Blot and qRT-PCR: TSA201 cells were maintained at 37° C. using Dulbecco's Modified Eagle Medium (Corning) supplemented with 10% fetal bovine serum, 1% L-glutamine, and 1% penicillin/streptomycin in a 5% CO₂ incubator. For allele-specific qRT-PCR and western blot experiments, 5×10⁵ cells were plated per well in 6-well plates. After 24 hours, cells were co-transfected in maintenance medium using 10 μL Effectene (Qiagen; Hilden, Germany) with 100 fmol (0.3-0.7 μg) equimolar amounts of each plasmid (pIRES2-EGFP-KCNH2-WT or -variant, pGFP-C-shLenti-shKCNH2(#1-#5) or -shCT, KCNH2-shIMM, or pGFP-C-shLenti-KCNH2-SupRep).

[0266] Western Blotting: TSA201 cells were co-transfected with KCNH2-WT, -shIMM, or -variants and shKCNH2(#1-5), -shCT, or KCNH2-SupRep as described above. After 48 hours, cells were lysed using 1×RIPA buffer with protease and phosphatase inhibitors. Lysates were chilled on ice for 10 minutes and then sonicated for 10 seconds at 50% amplitude, and the cell debris was pelleted at 21,000 rcf for 15 minutes at 4° C. The supernatant was transferred to a new tube and the protein concentration was measured using the Pierce BCA Protein Assay Kit (ThermoFisher) before mixing 1:1 with loading buffer (2× Laemmli buffer with 1:20 β-mercaptoethanol). Proteins (10 μg/lane) were run on a 4-15% TGX gel (Bio-Rad; Hercules, CA) and transferred to a PVDF membrane using a Trans-Blot Turbo Transfer System (Bio-Rad). After blocking for 1 hour in tris-buffered saline (TB S) with 0.1% Tween-20/3% bovine serum albumin, the membrane was incubated at 4° C. overnight with primary antibodies against KCNH2 (Alomone) and GAPDH housekeeping control (Santa Cruz, sc-376476) at 1:500 and 1:5000 dilutions, respectively, in blocking solution. The membrane was then washed in TBS-T for 3×15 minutes and incubated in secondary antibody HRP-conjugated goat-anti-rabbit (Invitrogen) at a dilution of 1:5000 in blocking solution. After 1 hour, the membrane was washed in TB S-T for 3×15 minutes. Finally, the membrane was incubated in SuperSignal™ West Pico PLUS chemiluminescent ECL substrate (ThermoFisher) and exposed to HyBlot CL autoradiography film (Denville Scientific Inc., E3012). Pixel density was quantified using freely available ImageJ software.

[0267] Allele-Specific qRT-PCR: Allele-specific primers were designed for qRT-PCR to specifically amplify total KCNH2, endogenous KCNH2 including KCNH2-WT and -variants, but excluding KCNH2-shIMM, and KCNH2-shIMM, by adapting allele-specific genotyping methods described elsewhere (Rohatgi et al., J Am Coll Cardiol. 2017, 70:453-462; and Priori et al., Heart Rhythm. 2013, 10:1932-1963). For total KCNH2, primers were purchased from IDT (Coralville, IA). For allele-specific primers, two reverse primers spanning the shKCNH2 target site with one complementary to endogenous KCNH2 (allele-specific for KCNH2-WT and -variants) and the other complementary to KCNH2-shIMM (allele-specific for KCNH2-shIMM) were used. A common forward primer was used for both allele-specific forward primers. GAPDH primers (IDT) were used as housekeeping controls. A standard curve was used to correct for PCR amplification bias. TSA201 cells were co-transfected as described above. After 48 hours, RNA was harvested using the RNeasy kit (Qiagen) and measured using the NanoDrop ND-1000 spectrophotometer (Thermo). Complementary DNA (cDNA) was generated by loading 500 ng RNA in the SuperScript IV VILO Master Mix reverse transcription kit (Thermo). Four qRT-PCR reactions were run per sample using the SYBR Green Master Mix kit (Qiagen) with the four sets of primers described above. Data were analyzed using the ΔΔCT method by first normalizing KCNH2 to GAPDH and then comparing the relative fold change to the KCNH2-WT and shCT treatment groups.

[0268] Lentivirus Generation and Transduction of iPSC-CMs: Lentivirus was used for application of KCNH2-SupRep or shCT (treatment control) to iPSC-CMs. Lentiviral particles were generated from pGFP-C-shLenti-shKCNH2-shIMM (KCNH2-SupRep) and pGFP-C-shLenti-shCT (shCT), using the pPACKH1 HIV Lentivector Packaging kit (SBI System Biosciences; Palo Alto, CA). After more than 30 days post-induction of differentiation, iPSC-CMs derived from two patients with LQT2 and their respective isogenic controls were dissociated and plated into MATRIGEL®-coated 35 mm dishes with glass-bottom insets for FluoVolt (MatTek; Ashland, MA) as described above. After 48 hours of recovery, iPSC-CMs were transduced with lentiviral particles containing KCNH2-SupRep or shCT. Polybrene (8 μg/mL) infection reagent (MilliporeSigma) was added to increase transduction efficiency and the iPSC-CMs were centrifuged at 250 rcf for 1.5 hours at room temperature in the 35 mm dishes. After 24 hours post-transduction, the medium was exchanged for fresh maintenance medium, RPMI/B27-ins.

[0269] Voltage Dye Optical Action Potentials in iPSC-CMs: Voltage dye experiments were conducted between 3-7 days post-transduction of iPSC-CMs with lentiviral particles containing either KCNH2-SupRep or shCT. On the day of imaging, iPSC-CMs were washed with pre-warmed (37° C.) HEPES-buffered Tyrode's solution (Alfa Aesar; Haverhill, MA). Each 35 mm glass-bottom dish was incubated at 37° C. for 20 minutes with 0.125 μL FluoVolt dye, 1.25 μL PowerLoad, and 0.5 mL Tyrode's solution (FluoVolt Membrane Potential kit, Thermo). Excess dye was rinsed thrice with Tyrode's solution, and a final 2 mL of Tyrode's solution was added to the iPSC-CMs for imaging. During imaging, the dishes were kept in a heated 37° C. stage-top chamber (Live Cell Instrument; Seoul, South Korea) with 5% CO₂. Under 40×-water objective magnification using a Nikon Eclipse Ti light microscope (Nikon; Tokyo, Japan), optical action potentials were recorded in 20 second fast time-lapse videos at a rate of 50 frames/second (fps, 20 ms exposure time) with LED illumination at 5% power. iPSC-CMs were paced at 1 Hz (9 ms pulse duration, 25V) using a MyoPacer field stimulator (Ion Optix; Westwood, MA) to eliminate beat-rate dependent effects on the APD. Rectangular regions of interest were drawn over flashing areas of cells for analysis. NIS-Elements software (Nikon) was used to measure the fluorescence intensity over time within each region of interest, resulting in optical action potential traces. The traces were corrected for photobleaching and the amplitude was normalized as change in fluorescence divided by the baseline minimum fluorescence (ΔF/Fₘᵢₙ) using a custom Excel program. In a semi-automated manner, common action potential parameters including APD₉₀, APD₅₀, amplitude, rise time, upstroke velocity, etc. were detected for each individual optical action potential and averaged across all beats within a 20 second trace. The average of all beats within a 20 second trace represented a single data point. For representative traces, the maximum amplitude was further normalized to 1.0 to allow for accurate visualization of APD differences.

[0270] Statistics: All statistical analysis was done using GraphPad Prism 9. Individual data points are shown where applicable along with the mean. Differences between group means of normally distributed parameters were assessed using a one-way analysis of variance (ANOVA) for comparisons among >3 groups. For multiple post-hoc ANOVA analyses, Tukey's test was used. A value of P<0.05 was considered statistically significant. For patch clamp experiments, data points are shown as the mean value and bars represent the standard error of the mean. GraphPad Prism 8.3 (GraphPad Software, San Diego, CA) was used for t-test. A Student's t-test was performed to determine statistical significance between two groups. A paired t-test was performed to determine statistical significance before and after E-4031. P<0.05 was considered to be significant.

[symbol]

TABLE 7
Summary of subjects selected for generation of iPSCs for iPSC-CM studies

| | | | | | | | | iPSC |
|---|---|---|---|---|---|---|---|---|
| | | Age at | | Average | | | | Source [symbol] |
| | | Sample | KCN [symbol] 2 | QT [symbol] (ms) | LQTS-Related | Family | | Generation |
| Subject | Sex | Collection | Variant(s) | [Range] | Symptoms | History | Treatment | Method |
| LQT2 #1 | Male | 13.1 | 0604S | [symbol] [439-581] | Aborted cardiac | — | LCSD, | PBMC [symbol] |
| | | | (c.1810G > A) | | arrest, | | Mexiletine, | Episomal |
| | | | | | cardiogenic | | Nadolol | DNA |
| | | | | | syncope | | | |
| LQT2 #2 | Female | 12.6 | N633S | [symbol] 45 [ [symbol] ] | Recurrent | Father passed | Transvenous | Fibroblasts [symbol] |
| | | | (c.1898A > G) | | syncope, Torsade | away from | ICD, LCSD, | Sendai |
| | | | | | de Pointes | SCD | Nadolol | |

KCNH2 variants are listed as the resulting change on the protein level with cDNA change in parenthesis.
QT [symbol] , Bazett-corrected QT interval;
ICD, implantable cardioverter defibrillator;
LCSD, left cardiac sympathic denervation;
PBMC, peripheral blood mononuclear cells;
SCD, sudden cardiac death. [symbol]
indicates data missing or illegible when filed

### Example 13—shRNA Knockdown of KCNH2

[0271] Seventeen (17) unique shRNAs targeting KCNH2 were tested, and one candidate shRNA (designated Rab_sh4) was identified that suppressed the endogenous KCNH2 alleles (both mutant and wild-type) in TSA201 cells with about 80% knockdown efficiency (FIG. 22). The shRNA (5′-CACGGAGCAGCCAGGGGAGGTGTCGGCCT-3; SEQ ID NO:27) (RNA sequence 5′-CACGGAGCAGCCAGGGGAGGUGUCGG CCU-3; SEQ ID NO:28) was completely homologous with the rabbit sequence and the human sequence. The shRNA was designed in a lentivirus backbone (pGFP-C-shLenti) and in an AAV9 backbone (pGFP-A-shAAV). Once this shRNA was identified, a SupRep construct containing the shRNA (SEQ ID NO:28) and an “shRNA-immune” (5′-TACCGAACAACCTGGCGAAGTCTCCGCGT-3; SEQ ID NO:29) version of the KCNH2 cDNA was generated (the shRNA for knocking down the endogenous KCNH2 alleles, and the shRNA-immune for simultaneously providing a replacement wild-type KCNH2 allele). As with KCNQ1, the shIM1V1 sequence had alterations at the wobble base of each codon within the shRNA target sequence, which prevented knockdown by the shRNA, but did not change the encoded amino acid sequence. The SupRep construct was designed in both a lentivirus backbone (pGFP-C-shLenti) and an AAV9 backbone (pGFP-A-shAAV), with five SupRep constructs generated in the lentivirus backbone and five in the AAV9 backbone. These constructs differed in the reporter sequences (P2A, Fusion-GFP, IRES, HA-Tag, and No reporter) that they contained. The 10 total constructs were as follows:
[0272] shLenti-SupRep-P2A
[0273] shLenti-SupRep-Fusion-GFP
[0274] shLenti-SupRep-IRES
[0275] shLenti-SupRep-HA Tag
[0276] shLenti-SupRep-No Reporter
[0277] shAAV-SupRep-P2A
[0278] shAAV-SupRep-Fusion-GFP
[0279] shAAV-SupRep-IRES
[0280] shAAV-SupRep-HA Tag

[0281] shAAV-SupRep-No Reporter

[0282] The SupRep constructs contained a CMV promoter and a human growth hormone (HGH) polyadenylation signal, but can be modified to include other promoters/enhancers. For example, the CMV promoter can be replaced with a cTnC promoter, which is smaller than the CMV promoter and more cardiac-specific. Additionally, the HGH polyadenylation signal can be replaced with a smaller SV40 terminator sequence. These modifications reduce the size of the SupRep construct and allow it to be packaged into AAV9 with greater efficiency.

### Example 14—SupRep Correction of KCNH2 In Vitro

[0283] CRISPR-Cas9 corrected isogenic controls were used as a marker for “ideal” correction of the cardiac APD. FluoVolt™ voltage dye was used to measure the cardiac APD in N633S iPSC-CMs and isogenic control iPSC-CMs generated from LQT2 iPSCs (N633S). APD_{90B} and APD_{50B} values for isogenic control treated with shCT and KCNH2-N633S variant treated with shCT or KCNH2-SupRep are plotted in FIG. 23. The isogenic control iPSC-CMs had significantly shorter APD_{90B} and APD_{50B} than the LQT2 iPSC-CMs treated with shCT, indicating that correction of the single pathogenic LQT2 variant in KCNH2 was able to rescue the disease phenotype in vitro. Treatment of LQT2 iPSC-CMs with KCNH2-SupRep resulted in APD_{90B} shortening that was not significantly different from the APD_{90B} of the isogenic control treated with shCT. For KCNH2-N633S, KCNH2-SupRep achieved “ideal” correction of the prolonged APD_{90B} and overcorrected the APD_{50B}.

[0284] In further studies, CRISPR-Cas9 corrected isogenic controls again served as a marker for correction of cardiac APD. Results from FluoVolt™ voltage dye measurement of cardiac APD in N633S iPSC-CMs and isogenic control iPSC-CMs generated from LQT2 iPSCs (N633S) are plotted in FIG. 24. APD_{90B} and APD_{50B} values for the untreated (UT) KCNH2-N633S variant, the SupRep treated isogenic control, and the untreated (UT) isogenic control are plotted. The treated and untreated isogenic control iPSC-CMs had significantly shorter APD_{90B} and APD_{50B} than the untreated LQT2 iPSC-CMs, again indicating that correction of the single pathogenic LQT2 variant in KCNH2 was able to rescue the disease phenotype in vitro. Treatment of the isogenic control iPSC-CMs with KCNH2-SupRep resulted in overcorrection in APD_{90B} and APD_{50B} shortening, compared to the untreated isogenic control.

[0285] Results from FluoVolt™ voltage dye measurement of cardiac APD in G604S iPSC-CMs are plotted in FIG. 25. APD₉₀ and APD₅₀ values for KCNH2-G604S variant treated with shCT or SupRep are plotted. Treatment of LQT2 iPSC-CMs with SupRep resulted in significant APD₉₀ and APD₅₀ shortening compared to those treated with shCT.

[0286] In additional studies, CRISPR-Cas9 corrected isogenic controls served as a marker for “ideal” correction of the cardiac APD. FluoVolt voltage dye measurement of the cardiac APD in G604S iPSC-CMs and isogenic control iPSC-CMs generated from LQT2 iPSCs (G604S) are shown in FIG. 26. APD₉₀ and APD₅₀ values for isogenic controls treated with shCT (3) and KCNH2-G604S variant treated with shCT (1) or KCNH2-SupRep (2) are shown. The isogenic control iPSC-CMs had significantly shorter APD₉₀ and APD₅₀ than the LQT2 iPSC-CMs treated with shCT, indicating that correction of the single pathogenic LQT2 variant in KCNH2 was able to rescue the disease phenotype in vitro. Treatment of LQT2 iPSC-CMs with KCNH2-SupRep resulted in APD₉₀ shortening. For KCNH2-G604S, KCNH2-SupRep overcorrected the prolonged APD₉₀ and APD₅₀ as compared to isogenic control treated with shCT.

[0287] CRISPR-Cas9 also was used to insert KCNH2-G628S into wild type cells that served as isogenic controls that provided a marker for “ideal” cardiac APD. FluoVolt voltage dye measurement of the cardiac APD in G628S iPSC-CMs and isogenic control iPSC-CMs are shown in FIG. 27. APD₉₀ values for isogenic controls treated with shCT (3) and KCNH2-G628S variant treated with shCT (1) or KCNH2-SupRep (2) are shown. The isogenic control iPSC-CMs had significantly shorter APD₉₀ than the LQT2 iPSC-CMs treated with shCT, indicating that insertion of a single pathogenic LQT2 variant in KCNH2 was able to show the disease phenotype in vitro. Treatment of LQT2 iPSC-CMs with KCNH2-SupRep resulted in APD₉₀ shortening. For KCNH2-G628S, KCNH2-SupRep overcorrected the prolonged APD₉₀ as compared to isogenic control treated with shCT.

### Example 15—KCNH2-SupRep Gene Therapy Both Suppresses and Replaces KCNH2-WT

[0288] To test whether KCNH2-shIMM is indeed immune to KD by shKCNH2 (sh#4), TSA201 cells were co-transfected with KCNH2-WT or KCNH2-shIMM and shKCNH2. The expression of KCNH2-WT versus KCNH2-shIMM was quantified using allele-specific qRT-PCR. Each sample was run in four separate reactions, using a unique set of allele-specific primers, to quantify (1) total KCNH2, (2) endogenous KCNH2, which included WT and variant-containing alleles, but excluded KCNH2-shIMM, (3) KCNH2-shIMM, and (4) GAPDH as a housekeeping control. Commercial primers were used to amplify total KCNH2. For exclusive amplification of endogenous KCNH2 or KCNH2-shIMM, two reverse primers were designed within the shKCNH2 target site, one complementary to the WT sequence and the other complementary to the unique, modified sequence engineered to create KCNH2-shIMM. A common forward primer was used for both reactions, and a standard curve was used to correct for PCR amplification bias. Results showed that shKCNH2 knocked down KCNH2-WT but not KCNH2-shIMM in TSA201 cells co-transfected with KCNH2-WT or KCNH2-shIMM and shCT, shKCNH2, or KCNH2-SupRep (FIG. 28A). Relative KCNH2 expression normalized to GAPDH was measured by allele-specific qRT-PCR quantifying KCNH2-WT (white) and KCNH2-shIMM (grey). Results were confirmed by western blotting for KCNH2 with GAPDH as a housekeeping control (FIG. 28B).

### Example 16—Validation of Variant-Independent Suppression and Replacement Using KCNH2-SupRep

[0289] To test whether the KCNH2-SupRep gene therapy knocked down and replaced KCNH2 in a variant independent manner, TSA201 cells were co-transfected with KCNH2-WT or KCNH2-variants and shCT, shKCNH2, or KCNH2-SupRep. Results showed that KCNH2-SupRep knocked down LQT2 disease-causing KCNH2 missense variants and replaced them with KCNH2-shIMM. shKCNH2 knocked down KCNH2 in a variant-independent manner. KCNH2-SupRep knocked down KCNH2 variants via shKCNH2 and expressed KCNH2-shIMM which was knockdown immune. The graph in FIG. 29A shows proportional expression of KCNH2-WT/variants and KCNH2-shIMM detected using allele-specific qRT-PCR to measure KCNH2-WT/variant (white) and KCNH2-shIMM (grey). FIG. 29B shows overall KCNH2 expression (not allele-specific) validated by western blotting with GAPDH as a housekeeping control.

### Example 17—KCNH2-AAV-P2A CTnC-EGFP Generated E-4031 Sensitive Outward Current in H9C2 Cells

[0290] To determine whether the cardiac specific KCNH2-AAV-P2A CTnC-EGFP was only expressed in cardiomyocytes and not in non-cardiomyocytes, heterologous expression and patch-clamp studies were performed in TSA201 cells for both KCNH2-pIRES2-EGFP with KCNE2-pIRES2-dsRed2 and KCNH2-AAV-P2A CTnC-EGFP. Co-expression of KCNH2-pIRES2-EGFP along with KCNE2-pIRES2-dsRed2 revealed robust Iₖᵣ current. However, expression of KCNH2-AAV-P2A CTnC-EGFP only exhibited endogenous outward current from TSA201 cells, not typical KCNH2 current (FIGS. 30A and 30B) indicating that KCNH2-AAV-P2A CTnC-EGFP was not expressed in TSA201 cells. Peak current density was significantly smaller lower the voltage range from −10 mV to +20 mV for KCNH2-AAV-P2A CTnC-EGFP expression (FIG. 30C). At +10 mV, the peak current density was 41.4±3.4 pA/pF (KCNH2-pIRES2-EGFP, n=9) and 23.2±3.0 pA/pF (KCNH2-AAV-P2A CTnC-EGFP, n=8, p<0.05 vs. KCNH2-pIRES2-EGFP) (FIG. 30D).

[0291] To determine whether cardiac specific KCNH2-AAV-P2A CTnC-EGFP was expressed in cardiomyocytes and could generate KCNH2 current, heterologous expression and patch-clamp studies were performed in H9C2 cells, which are rat neonatal cardiomyocytes. Empty H9C2 cells only exhibited a small outward current (FIG. 31A, upper panel), whereas with KCNH2-AAV-P2A CTnC-EGFP expression, robust outward current was revealed (FIG. 31A, middle panel). This outward current was inhibited by a specific KCNH2 channel blocker (500 nM E-4031) (FIG. 31A, lower panel). The peak current density was significantly increased across the voltage range from −20 mV to +60 mV for KCNH2-AAV-P2A CTnC-EGFP expression (P<0.05 vs. empty H9C2) (FIG. 31B). At +60 mV, the peak current density was 17.3±3.8 pA/pF (empty H9C2, n=9) and 29.8±3.6 pA/pF (KCNH2-AAV-P2A CTnC-EGFP, n=9, p<0.05 vs. empty H9C2) (FIG. 31C). 500 nM E-4031 significantly inhibited KCNH2-AAV-P2A CTnC-EGFP expressed outward current across the voltage range from +10 mV to +60 mV (P<0.05 vs. before E-4031) (FIG. 31D). At +60 mV, peak current density was 29.8±5.4 pA/pF (before E-4031, n=6) and 19.1±3.2 pA/pF (after E-4031, n=6, p<0.05 vs. before E-4031) (FIG. 31E).

### Example 18—KCNH2-SupRep Prolongs the Pathologically Shortened Cardiac APD in SQT1 iPSC-CMs as Measured by FluoVolt Voltage Dye

[0292] To show that KCNH2-SupRep can rescue both LQT2 and type 1 short QT (SQT1) disease phenotypes, CRISPR-Cas9 was used to insert KCNH2-N588K, a known SQT1 variant, into wildtype cells which serve as the isogenic control (FIG. 32). Isogenic controls served as markers for “ideal” cardiac APD. FluoVolt voltage dye measurement of the cardiac APD in N588K iPSC-CMs and isogenic control iPSC-CMs are plotted in FIG. 32. APD₉₀ and APD₅₀ values for isogenic control treated with shCT and KCNH2-N588K variant treated with shCT (1) or KCNH2-SupRep (2) are shown. The isogenic control iPSC-CMs (3) had significantly longer APD₉₀ and APD₅₀ than the SQT1 iPSC-CMs treated with shCT, which indicated that insertion of a single pathogenic type 1 short QT (SQT1) variant in KCNH2 was able to show the disease phenotype in vitro. Treatment of SQT1 iPSC-CMs with KCNH2-SupRep resulted in APD₉₀ prolongation. For KCNH2-N588K, KCNH2-SupRep corrected the shortened APD₉₀ and APD₅₀ as compared to isogenic control treated with shCT.

### Example 19—Materials and Methods for LQT3 SupRep

[0293] LQT3 Patient Selection for iPSC Generation: Patients were evaluated by a genetic cardiologist and LQTS specialist. Dermal fibroblasts and PBMCs were collected by 4 mm skin punch biopsy and blood sample, respectively. Samples were obtained from nearly 1200 patients diagnosed with a variety of inherited cardiac channelopathies and their affected or unaffected family members, including 80 patients with LQT3. For generation of iPSCs, four LQT3 patients bearing mutations resulting in the following changes on the protein level were selected: P1332L, R1623Q, and F1760C (TABLE 8).

[0294] Fibroblast/PBMCs Reprogramming into iPSCs and Quality Control: Fibroblasts or PBMCs were reprogrammed by Sendai virus transduction using the CytoTune-iPS 2.0 reprogramming kit (Thermo; Waltham, MA) or electroporation with four episomal DNA plasmids containing the Yamanaka factors: pCXLE-hUL, pCXLE-hSK, pCXLE-hOCT3/4-shp53-F, and pCXWB-EBNA1 (Addgene; Watertown, MA). At least two colonies were picked within 21 days post-induction and clonally expanded. All iPSCs were cultured in mTeSR™1 (STEMCELL®) supplemented with 1% penicillin/streptomycin on MATRIGEL®-coated (Corning) 6 cm culture dishes in a 5% CO₂ incubator at 37° C. At 85% confluence, iPSCs were passaged using ReLeSR (STEMCELL®). Each clone was then karyotyped.

[0295] All lines had a normal karyotype. SCN5A variant confirmation was conducted by Sanger sequencing of PCR-amplicons from genomic DNA. Expression of pluripotent markers in all iPSC clones was confirmed by confocal immunofluorescence microscopy using primary antibodies against Oct4 (Thermo, PA5-27438), Nanog (Thermo, PA1-097), Tra-1-60 (Santa Cruz; Dallas, TX; sc-21705), and SSEA-4 (Thermo, MA1-021) at a 1:250 dilution. Secondary antibodies were ALEXA FLUOR® 488 goat-anti-mouse (Thermo, A-11001) and ALEXA FLUOR® 594 goat-anti-rabbit (Thermo, A-11037). Counterstaining with DAPI (Thermo) was used at a 1:2000 dilution from a 5 mg/mL stock. Images were acquired on a Zeiss LSM 980 confocal microscope.

[0296] Quality control for iPSCs: Standard quality control assays were performed on SCN5A-F1760C iPSC line, including Sanger sequencing of the LQT3-causative variant, karyotyping, bright field morphology, and immunofluorescence microscopy for pluripotent markers including Tra-1-60, Nanog, SSEA-4, and Oct4 (FIG. 33A-33D). Differentiation of iPSCs was induced by methods described elsewhere to generate spontaneously beating iPSC-CMs (Burridge et al., supra; and Mummery et al., supra). Since the cardiac APD is known to shorten as iPSC-CMs mature over time, all experiments were conducted at least 30 days after the induction of differentiation (Shaheen et al., supra).

[0297] iPSC-CM Culture, Differentiation, and Dissociation: When iPSCs were 85% confluent, differentiation into cardiomyocytes (CMs) was induced as described elsewhere (Schwartz 2009, supra; and Schwartz 2013, supra). Differentiation was initiated (day 0) by changing the culture medium to RPMI 1640 GlutaMAX™ plus 25 mM HEPES ((4-(2-hydroxyethyl)-1-piperazineethanesulfonic acid)) supplemented with B27-minus insulin (RPMI/B27-ins) (Thermo) containing 51.1M CHIR99021 (MilliporeSigma; St. Louis, MO). On day 2, the medium was changed to RPMI/B27-ins containing 51.1M IWP-2 (MilliporeSigma). On day 4, the medium was changed back to the maintenance medium RPMI/B27-ins. Spontaneous beating typically began on days 6-7, with expansion to remaining cells by days 10-12. The iPSC-CMs were allowed to mature until at least day 30, changing the media twice per week. After day 30, iPSC-CMs were dissociated enzymatically using STEMdiff™ cardiomyocyte dissociation kit (STEMCELL®). Briefly, cells were rinsed with PBS (without Ca²⁺/Mg²⁺) and placed in dissociation medium for 10 minutes at 37° C., and then deactivated by addition of STEMdiff™ Cardiomyocyte Support Medium (STEMCELL®). Cells were triturated, transferred to a 15 mL conical tube, and pelleted by centrifugation at 300 rcf for 3 minutes. The supernatant was aspirated and the cells suspended in Cardiomyocyte Support Medium before transfer to appropriate MATRIGEL®-coated culture ware. After 24 hours, the medium was changed back to RPMI/B27-ins. Dissociation resulted in a mixture of single cells and small-to-medium sized iPSC-CM clusters, depending on cell density before and after plating. Spontaneous beating generally returned 24 hours after dissociation, with strong electrical coupling and syncytia formation between days 3-7.

[0298] CRISPR-Cas9 Corrected Isogenic Control iPSC: Isogenic “variant corrected” control iPSC cell lines were commercially created for the three patient-specific LQT3 cells lines harboring either SCN5A-R1623Q, SCN5A-P1332L, or SCN5A-F1760C mutation. These isogenic controls serve as the gold standard for a possible therapeutic cure, thereby providing a marker for the “ideal” rescue/normalization of the prolonged APD and indicating how close to this ideal did treatment with SCN5A-SupRep gene therapy reach.

[0299] Lentivirus Generation and Transduction of iPSC-CMs: Lentivirus was used for application of SCN5A-SupRep to iPSC-CMs (or shCT as a treatment control). Lentiviral particles were generated from shLenti-shSCN5A-shIMM-P2A-GFP (SCN5A-GFP-SupRep) and shLenti-shSCN5A-shIMM-HA (SCN5A-HA-SupRep), using the pPACKH1 HIV Lentivector Packaging kit (SBI System Biosciences; Palo Alto, CA). After reaching at least day 30 post-induction of differentiation, iPSC-CMs patient with LQT3 were dissociated and plated into MATRIGEL®-coated 35 mm dishes with glass-bottom insets for FLUOVOLT™ (MatTek) or 10-well culture reaction slides for immunofluorescence (Marienfeld SUPERIOR™) as described above. After 24-48 hours of recovery, iPSC-CMs were left untreated or were transduced with lentiviral particles containing SCN5A-SupRep. To increase transduction efficiency, Polybrene infection reagent (MilliporeSigma) was added during transduction to a final concentration of 8 μg/mL and the iPSC-CMs were centrifuged at 250 rcf for 1.5 hours at room temperature in the 35 mm dishes. At 24 hours post-transduction, the medium was exchanged for fresh maintenance medium, RPMI/B27-ins.

[0300] Voltage Dye Optical Action Potentials in iPSC-CMs: Voltage dye experiments were conducted between 3-7 days post-transduction of iPSC-CMs with lentiviral particles containing SCN5A-SupRep. On the day of imaging, iPSC-CMs were rinsed with pre-warmed (37° C.) HEPES-buffered Tyrode's solution (Alfa Aesar). Using the FLUOVOLT™ Membrane Potential kit (Thermo), 0.125 μL FLUOVOLT™ dye and 1.25 μL PowerLoad were added to 0.5 mL Tyrode's solution for each 35 mm glass-bottom dish and incubated at 37° C. for 20 minutes. Excess dye was removed in three rinses with pre-warmed Tyrode's solution, and a final 2 mL Tyrode's solution was added to the iPSC-CMs for imaging. During imaging, the dishes were kept in a heated 37° C. stage-top chamber (Live Cell Instrument) with 5% CO₂. Using a Nikon Eclipse Ti light microscope (Nikon) under 40×-water objective magnification, optical action potentials were recorded in 20 second fast time-lapse videos at a rate of 50 frames/second (fps, 20 ms exposure time) with LED illumination at 5% power. iPSC-CMs were paced at 1 Hz (9 ms pulse duration, 25V) using a MyoPacer field stimulator (Ion Optix; Westwood, MA) to eliminate beat-rate dependent effects on the APD. Videos were focused on electrically-coupled syncytial areas of iPSC-CMs (clusters and monolayers) since these areas of cells best follow the pacing stimulus and produce the greatest signal-to-noise represented by large changes in fluorescence intensity (often ˜8-12%). For analysis, rectangular regions of interest were drawn over flashing areas of cells, and NIS-Elements software (Nikon) was used to quantify the fluorescence intensity over time within each region of interest, resulting in optical action potential traces. Using a custom Excel-based program, traces were corrected for photobleaching and the amplitude was normalized as change in fluorescence divided by the baseline minimum florescence (ΔF/Fₘᵢₙ). In a semi-automated manner, common action potential parameters including APD₉₀, APD₅₀, amplitude, rise time, upstroke velocity, etc. were detected for each individual optical action potential and averaged across all beats within a 20 second trace. The average of all beats within a 20 second trace represented a single data point. For representative traces, the maximum amplitude was further normalized to 1.0 to allow for accurate visualization of APD differences.

[0301] Statistics: GraphPad Prism 9 was used for all statistical analysis and to fit all data for figures. Individual data points are shown wherever practical along with the mean. Error bars represent standard error of the mean (SEM). An unpaired two-tailed student's t-test was performed to determine statistical significance between two groups when indicated. p<0.05 was considered to be significant.

[symbol]

TABLE 8
Summary of subjects selected for generation of iPSCs for iPSC-CM studies

| | | Age at | | Average | LOTS [symbol] | | | IPSC Source [symbol] |
|---|---|---|---|---|---|---|---|---|
| | | Sample | SCN [symbol] | QT [symbol] | Related | Family | | Generation |
| Subject | Sex | Collection | Variant(s) | (ms) | Symptoms | History | Treatment | Method |
| LQT3 #1 | Female | [symbol] | P1332L | 583 | Cardiac arrest at age | — | Nadolol and | PBMC [symbol] |
| | | | (c.3995C > T) | | 25 months | | mexiletine | Episomal |
| | | | | | | | | DNA |
| LQT3 #2 | Male | 3.1 | R1623Q | 480 | Recurrent episodes | Symptomatic | Propranolol, | Fibroblasts [symbol] |
| | | | (c.4868G > A) | | of spontaneously | LQTS in | mexiletine, ICD | Sendai |
| | | | | | [symbol] and ICD- | twin | implant, RCSD, | |
| | | | | | [symbol] VF | brother | LCSD, Heart | |
| | | | | | | | transplant | |
| LQTS #3 | Female | 2 months | F1760C | 680 | Several long | — | Mexiletine, | PBMC [symbol] |
| | | | (c. [symbol] 279T > C) | | episodes of [symbol] | | LCSD, ICD, | Episomal |
| | | | | | de pointes, 3:1 AV | | | DNA |
| | | | | | block | | | |
| | | | | | SCD at age [symbol] | | | |
| | | | | | months | | | |

SCN [symbol] variants are listed as the resulting change on the protein level with cDN A change in parenthesis.
QT [symbol] , Bazett-corrected QT interval;
ICD, implantable cardioverter defibrillator;
PBMC, peripheral blood mononuclear cells;
LCSD, left cardiac sympathie denervation;
LCSD, right cardiac sympathie denervation;
SCD, sudden cardiac death. [symbol]
indicates data missing or illegible when filed

### Example 20—shRNA Knockdown of SCN5A

[0302] To make SCN5A-SupRep, six candidate SCN5A shRNAs (sh#1-6) in the pGFP-C-shLenti lentiviral backbone were tested. The KD efficiency of each SCN5A shRNA was determined by co-transfecting TSA201 cells with SCN5A-WT and sh#1-6. Expression of SCN5A was measured by quantitative reverse transcription PCR (qRT-PCR, FIG. 34). Of the six shRNAs tested, sh#1, sh#3, sh#4 and sh#5 all resulted in significant KD of SCN5A (mRNA: 78-91% KD). Thus, any of these shRNAs could have been used as part of the final SCN5A-SupRep gene therapy vector. By raw KD, however, SCN5A sh#1 (5′-GGTTCACTCGCTCTTCAACATGCTCATCA-3; SEQ ID NO:30) (RNA sequence 5′-GGUUCACUCGCUCUUCAACAUGCUCAUCA-3; SEQ ID NO:31) provided the strongest KD of SCN5A, suppressing the endogenous SCN5A alleles (both mutant and wild-type) in TSA201 cells with about 91% knockdown efficiency (FIG. 34). Further, at the time of selection, the SCN5A sh#1 target sequence was assessed using the Genome Aggregation Database (gnomAD) and ClinVar, and was found to be devoid of both common genetic polymorphisms and all known pathogenic LQT3-causative mutations that may interfere with KD efficiency. SCN5A sh#1 therefore was selected for the final SCN5A-SupRep and is referred to as “shSCN5A.”

[0303] The shRNA was designed in a lentivirus backbone (pGFP-C-shLenti). Once this shRNA was identified, a SupRep construct containing the shRNA (SEQ ID NO:31) and an “shRNA-immune” (5′-CGTACATTCCCTGTTTAATATGCTGATTA-3; SEQ ID NO:32) version of the SCN5A cDNA was generated (the shRNA for knocking down the endogenous SCN5A alleles, and the shRNA-immune for simultaneously providing a replacement wild-type SCN5A allele). As with KCNQ1, the shIMM sequence had alterations at the wobble base of each codon within the shRNA target sequence, which prevented knockdown by the shRNA, but did not change the encoded amino acid sequence. The SupRep construct was designed in a lentivirus backbone (pGFP-C-shLenti), with three SupRep constructs generated in the lentivirus backbone. These constructs differed in the reporter sequences (P2A, HA-Tag, and No reporter) that they contained. The 3 total constructs were as follows:
[0304] shLenti-SupRep-P2A
[0305] shLenti-SupRep-HA Tag
[0306] shLenti-SupRep-No Reporter

[0307] The final SCN5A-SupRep gene therapy vector used in this in vitro study is illustrated in FIG. 35. The SupRep constructs contained a CMV promoter and a human growth hormone (HGH) polyadenylation signal, but can be modified to include other promoters/enhancers. For example, the CMV promoter can be replaced with a cTnC promoter, which is smaller than the CMV promoter and more cardiac-specific. Additionally, the HGH polyadenylation signal can be replaced with a smaller SV40 terminator sequence. These modifications reduce the size of the SupRep construct and allow it to be packaged into AAV9 with greater efficiency.

### Example 21—SCN5A-SupRep Gene Therapy Shortens the Cardiac APD in LQT3 iPSC-CMs as Measured by FLUOVOLT™ Voltage Dye

[0308] Action potential analyses were conducted to test whether treatment with SCN5A-SupRep gene therapy was able to rescue the pathognomonic feature of LQT3 by shortening the pathologically prolonged APD. FLUOVOLT™ voltage dye was used to measure optical action potentials in iPSC-CMs derived from a patient with LQT3-causing SCN5A-F1760C treated with SCN5A-SupRep gene therapy. All iPSC-CMs were paced at 1 Hz during recording to eliminate beat rate-dependent changes to the APD. Representative optical action potentials are shown in FIG. 36A. When untreated, SCN5A-F1760C iPSC-CMs had a significantly longer APD at 90% repolarization (APD₉₀) and had a significantly longer APD at 50% repolarization (APD₅₀) compared to untreated unrelated healthy control iPSC-CMs, validating the SCN5A-F1760C iPSC-CMs as an in vitro model of LQT3. APD shortening due to SCN5A-SupRep compared to untreated SCN5A-F1760C iPSC-CMs was then assessed by unpaired two-tailed student's t-tests at both the APD₉₀ and APD₅₀ levels separately for each variant. SCN5A-SupRep resulted in statistically significant attenuation of both APD₉₀ and APD₅₀ in SCN5A-F1760C iPSC-CMs (FIG. 36B). When treated with SCN5A-SupRep, the APD₉₀ and APD₅₀ of SCN5A-F1760C lines shortened significantly. These results indicated that suppression-replacement gene therapy is a promising strategy for directly targeting the pathogenic substrate and ameliorating the resultant disease for LQT3.

### Example 22—shRNA Knockdown of MYH7

[0309] Six (6) unique shRNAs targeting MYH7 were tested, and one candidate shRNA (designated sh2) was identified that suppressed the endogenous MYH7 alleles (both mutant and wild-type) in TSA201 cells with about 85% knockdown efficiency (FIG. 37). The shRNA (5′-GCTGAAAGCAGAGAGAGATTATCACATTT-3; SEQ ID NO:33) (RNA sequence 5′-GCUGAAAGCAGAGAGAGAUUAUCACAUUU-3; SEQ ID NO:34) was completely homologous with the human sequence. The shRNA was designed in a lentivirus backbone (pGFP-C-shLenti). Once this shRNA was identified, a SupRep construct containing the shRNA (SEQ ID NO:34) and an “shRNA-immune” (5′-ACTCAAGGCTGAAAGGGACTACCATATAT-3; SEQ ID NO:35) version of the MYH7 cDNA was generated (the shRNA for knocking down the endogenous MYH7 alleles, and the shRNA-immune for simultaneously providing a replacement wild-type MYH7 allele). As with KCNQ1, the shIMM sequence had alterations at the wobble base of each codon within the shRNA target sequence, which prevented knockdown by the shRNA, but did not change the encoded amino acid sequence. The SupRep construct was designed in a lentivirus backbone (pGFP-C-shLenti), with three SupRep constructs generated in the lentivirus backbone. These constructs differed in the reporter sequences (P2A, HA-Tag, and No reporter) that they contained. The 3 total constructs were as follows:
[0310] shLenti-SupRep-P2A
[0311] shLenti-SupRep-HA Tag
[0312] shLenti-SupRep-No Reporter

[0313] The SupRep constructs contained a CMV promoter and a human growth hormone (HGH) polyadenylation signal, but can be modified to include other promoters/enhancers. For example, the CMV promoter can be replaced with a cTnC promoter, which is smaller than the CMV promoter and more cardiac-specific. Additionally, the HGH polyadenylation signal can be replaced with a smaller SV40 terminator sequence. These modifications reduce the size of the SupRep construct and allow it to be packaged into AAV9 with greater efficiency.

### Example 23—Materials and Methods for PKP2 SupRep

[0314] Generation of a PKP2-SupRep gene therapy construct: To make PKP2-SupRep, eight candidate PKP2 shRNAs (sh#1-8) in the pGFP-C-shLenti lentiviral backbone were tested. The KD efficiency of each PKP2 shRNA was determined by co-transfecting TSA201 cells with PKP2-WT and sh#1-8. Expression of PKP2, normalized to GAPDH, was measured by qRT-PCR (FIG. 38). Of the eight shRNAs tested, sh#2, sh#4, sh#6 and sh#7 all resulted in significant KD of PKP2 (mRNA: 75-90% KD). Any of these shRNAs could in theory have been used as part of the final PKP2-SupRep gene therapy vector. To select a final shRNA from the four potential candidates, by raw KD, PKP2 sh#7 (5′-GCAGAGCTCCCAGAGAAATAT-3; SEQ ID NO:52) (RNA sequence 5′-GCAGAGCUCCCAGAGAAAUAU-3; SEQ ID NO:53) provided the strongest KD of PKP2 on both the mRNA (90%) levels. Further, at the time of selection, the PKP2 sh#7 target sequence was assessed using the Genome Aggregation Database (gnomAD) and ClinVar, and was found to be devoid of both common genetic polymorphisms and all known pathogenic ACM-causative mutations that may interfere with KD efficiency. PKP2 sh#7 therefore was selected for the final PKP2-SupRep and is referred to as “shPKP2.”

[0315] To create the replacement shRNA-immune version of PKP2, called PKP2-shIMM, ten synonymous variants were introduced into the WT PKP2 cDNA (NM_004572.4) at the wobble base of each codon within the shPKP2 target site (5′-GCTGAACTGCCTGAAAAGTAC-3; SEQ ID NO:990). PKP2-shIMM was then cloned into the shPKP2-containing vector, pGFP-C-shLenti, downstream of the CMV promoter. Three variations of the construct were made: shLenti-SupRep-P2A-GFP, shLenti-SupRep-HA Tag, shLenti-SupRep-No Reporter.

[0316] PKP2 Patient Selection for iPSC Generation: Patients were evaluated by a genetic cardiologist. Dermal fibroblasts and PBMCs were collected by 4 mm skin punch biopsy and blood sample, respectively. Samples were obtained from nearly 1200 patients diagnosed with a variety of inherited cardiac channelopathies and their affected or unaffected family members, including 29 patients with PKP2 variants. Four patients with PKP2 variants were selected for generation of iPSCs: R79X, E149X, Q457X, c.2146-1G>C.

[0317] Fibroblast/PBMCs Reprogramming into iPSCs and Quality Control: Fibroblasts or PBMCs were reprogrammed by Sendai virus transduction using the CytoTune-iPS 2.0 reprogramming kit (Thermo) or electroporation with four episomal DNA plasmids containing the Yamanaka factors: pCXLE-hUL, pCXLE-hSK, pCXLE-hOCT3/4-shp53-F, and pCXWB-EBNA1 (Addgene; Watertown, MA). At least two colonies were picked within 21 days post-induction and clonally expanded. All iPSCs were cultured in mTeSR™1 (STEMCELL®) supplemented with 1% penicillin/streptomycin on MATRIGEL®-coated (Corning) 6 cm culture dishes in a 5% CO₂ incubator at 37° C. At 85% confluence, iPSCs were passaged using ReLeSR (STEMCELL®). Each clone was then karyotyped.

[0318] All lines had a normal karyotype. PKP2 variant confirmation was conducted by Sanger sequencing of PCR-amplicons from genomic DNA. Expression of pluripotent markers in all iPSC clones was confirmed by confocal immunofluorescence microscopy using primary antibodies against Oct4 (Thermo, PAS-27438), Nanog (Thermo, PA1-097), Tra-1-60 (Santa Cruz; Dallas, TX; sc-21705), and SSEA-4 (Thermo, MA1-021) at a 1:250 dilution. Secondary antibodies were ALEXA FLUOR® 488 goat-anti-mouse (Thermo, A-11001) and ALEXA FLUOR® 594 goat-anti-rabbit (Thermo, A-11037). Counterstaining with DAPI (Thermo) was used at a 1:2000 dilution from a 5 mg/mL stock. Images were acquired on a Zeiss LSM 980 confocal microscope.

[0319] Quality control for iPSCs: Standard quality control assays were performed on c.2146-1G>C iPSC line, including Sanger sequencing of the ACM-causative variant, karyotyping, bright field morphology, and immunofluorescence microscopy for pluripotent markers including Tra-1-60, Nanog, SSEA-4, and Oct4 (FIG. 39A-39D). Differentiation of iPSCs was induced by methods described elsewhere to generate spontaneously beating iPSC-CMs (Burridge et al., supra; and Mummery et al., supra). Since the cardiac APD is known to shorten as iPSC-CMs mature over time, all experiments were conducted at least 30 days after the induction of differentiation (Shaheen et al., supra).

[0320] iPSC-CM Culture, Differentiation, and Dissociation: When iPSCs were 85% confluent, differentiation into cardiomyocytes (CMs) was induced as described elsewhere (Schwartz 2009, supra; and Schwartz 2013, supra). Differentiation was initiated (day 0) by changing the culture medium to RPMI 1640 GLUTAMAX™ plus 25 mM HEPES ((4-(2-hydroxyethyl)-1-piperazineethanesulfonic acid)) supplemented with B27-minus insulin (RPMI/B27-ins) (Thermo) containing 51.1M CHIR99021 (MilliporeSigma). On day 2, the medium was changed to RPMI/B27-ins containing 5 μM IWP-2 (Millipore Sigma). On day 4, the medium was changed back to the maintenance medium RPMI/B27-ins. Spontaneous beating typically began on days 6-7, with expansion to remaining cells by days 10-12. The iPSC-CMs were allowed to mature until at least day 30, changing the media twice per week. After day 30, iPSC-CMs were dissociated enzymatically using STEMDIFF™ cardiomyocyte dissociation kit (STEMCELL®). Briefly, cells were rinsed with PBS (without Ca²⁺/Mg²⁺) and placed in dissociation medium for 10 minutes at 37° C., and then deactivated by addition of STEMDIFF™ Cardiomyocyte Support Medium (STEMCELL®). Cells were triturated, transferred to a 15 mL conical tube, and pelleted by centrifugation at 300 rcf for 3 minutes. The supernatant was aspirated, and the cells suspended in Cardiomyocyte Support Medium before transfer to appropriate MATRIGEL®-coated culture ware. After 24 hours, the medium was changed back to RPMI/B27-ins. Dissociation resulted in a mixture of single cells and small-to-medium sized iPSC-CM clusters, depending on cell density before and after plating. Spontaneous beating generally returned 24 hours after dissociation, with strong electrical coupling and syncytia formation between days 3-7.

[0321] Lentivirus Generation and Transduction of iPSC-CMs: Lentivirus was used for application of PKP2-SupRep to iPSC-CMs. Lentiviral particles were generated from shLenti-shPKP2-shIMM-P2A-GFP (PKP2-GFP-SupRep) and shLenti-shPKP2-shIMM-HA (PKP2-HA-SupRep), using the pPACKH1 HIV Lentivector Packaging kit (SBI System Biosciences; Palo Alto, CA). After reaching at least day 30 post-induction of differentiation, iPSC-CMs from a patient with ACM were dissociated and plated into MATRIGEL -coated 35 mm dishes with glass-bottom insets for Fluo-4 AM (Invitrogen; cat #F14201) or 10-well culture reaction slides for immunofluorescence (Marienfeld SUPERIOR™) as described above. After 24-48 hours of recovery, iPSC-CMs were left untreated or were transduced with lentiviral particles containing PKP2-SupRep. To increase transduction efficiency, Polybrene infection reagent (MilliporeSigma) was added during transduction to a final concentration of 8 μg/mL and the iPSC-CMs were centrifuged at 250 rcf for 1.5 hours at room temperature in the 35 mm dishes. After 24 hours post-transduction, the medium was exchanged for fresh maintenance medium, RPMI/B27-ins.

[0322] Intracellular Calcium Assay in iPSC-CMs: Intracellular calcium assay experiments were conducted between 3-7 days post-transduction of iPSC-CMs with lentiviral particles containing PKP2-SupRep. On the day of imaging, iPSC-CMs were rinsed with pre-warmed (37° C.) HEPES-buffered Tyrode's solution (Alfa Aesar). Fluo-4 AM dye (Invitrogen) was dissolved in 50 μL DMSO, then 5 μL Fluo-4 AM and 2 μL PLURONIC™ F-127 (Invitrogen) were added to 1 mL Tyrode's solution for each 35 mm glass-bottom dish and incubated at 37° C. for 30 minutes. Excess dye was removed in one rinse and two 5-minute washes with pre-warmed Tyrode's solution, and a final 1.5 mL Tyrode's solution was added to the iPSC-CMs for imaging. During imaging, the dishes were kept in a heated 37° C. stage-top chamber (Live Cell Instrument) with 5% CO₂. Using a Nikon Eclipse Ti light microscope (Nikon) under 40X-water objective magnification, calcium transients were recorded in 20 second fast time-lapse videos at a rate of 50 frames/second (fps, 20 ms exposure time) with LED illumination at 5% power. iPSC-CMs were paced at 0.5 Hz (9 ms pulse duration, 25V) using a MyoPacer field stimulator (Ion Optix; Westwood, MA) to eliminate beat-rate dependent effects on the calcium transient. Videos were focused on electrically-coupled syncytial areas of iPSC-CMs (clusters and monolayers) since these areas of cells best follow the pacing stimulus and produce the greatest signal-to-noise represented by large changes in fluorescence intensity. For analysis, rectangular regions of interest were drawn over flashing areas of cells, and NIS-Elements software (Nikon) was used to quantify the fluorescence intensity over time within each region of interest, resulting in traces of calcium transients. Using a custom Excel-based program, traces were corrected for photobleaching and the amplitude was normalized as change in fluorescence divided by the baseline minimum florescence (ΔF/Fₘᵢₙ). In a semi-automated manner, common calcium transient parameters including Ca²⁺ amplitude, 50% and 90% Ca²⁺ transient duration (CTD), peak to 50% and peak to 90% decay, upstroke time, upstroke velocity, Vmax, etc. were detected for each individual calcium transient and averaged across all beats within a 20 second trace, except in case of Ca²⁺ amplitude where the value was taken only for the first beat. For all parameters, except for Ca²⁺ amplitude, the average of all beats within a 20 second trace represented a single data point. Upon recording the baseline measurements, 0.5 ml 400 nM isoproterenol was added to cells to make a final concentration of 100 nM and calcium transient recordings were taken every one minute for a total of 10 minutes. Traces were analyzed the same was as described above for baseline measurement.

[0323] Statistics: GraphPad Prism 9 was used for all statistical analysis and to fit all data for figures. Individual data points are shown wherever practical along with the mean. Error bars represent standard error of the mean (SEM). Two-way ANOVA with post-hoc Tukey's test for multiple comparisons also was used. A p<0.05 was considered to be significant.

### Example 24—PKP2-SupRep Gene Therapy Shortens Transient Duration and Decay Time in ACM iPSC-CMs as Measured by Fluo-4 AM

[0324] Calcium transient analyses were conducted to test whether treatment with PKP2-SupRep gene therapy was able to rescue the abnormal calcium handling feature of ACM. Fluo-4 AM dye was used to measure calcium transients in iPSC-CMs derived from patient with c.2146-1G>C PKP2 variant treated with PKP2-SupRep gene therapy. All iPSC-CMs were paced at 0.5 Hz during recording to eliminate beat rate-dependent changes to the calcium transient. Prolonged Ca²⁺ decay time is a key pathophysiology of ARVC, and may lead to remodeling of cardiac tissue into myopathic state, such as elevation of fibrosis and aseptic inflammation mediated exacerbation of desmosome alteration. Further, prolongation of Ca²⁺ decay time can accelerate arrhythmic potential through maladaption of sarcolemmal channel functions such as NCX1, LTCC, and Na⁺ channels which elicit DAD and EAD. These studies demonstrated that SupRep successfully rescued arrhythmic potential with one delivery of therapeutic regimen (FIG. 40).

### Example 25—shRNA Knock Down of DSP

[0325] TSA201 cells were co-transfected with DSP-WT and six custom DSP shRNAs (sh1-6) or a non-targeting scrambled shRNA control (shCT). DSP expression normalized to GAPDH was measured by qRT-PCR. sh5 (5′-GCACTACTGCATGATTGACATAG AGAAGA-3; SEQ ID NO:44) (RNA sequence 5′-GCACUACUGCAUGAUUGACA UAGAGAAGA-3; SEQ ID NO:45) had the strongest knockdown by raw value (FIG. 41), with about 88% knockdown efficiency.

### Example 26—shRNA Knock Down of MYBPC3

[0326] TSA201 cells were co-transfected with MYBPC3-WT and six custom MYBPC3 shRNAs (sh1-6) or non-targeting scramble shRNA control (shCT). MYBPC3 expression normalized to GAPDH was measured by qRT-PCR. sh4 (5′-GGAGGAGACCTTCAAAT ACCGGTTCAAGA-3; SEQ ID NO:46) (RNA sequence 5′-GGAGGAGACCUUCAAA UACCGGUUCAAGA-3; SEQ ID NO:47) had the strongest knockdown by raw value (FIG. 42), with about 82% knockdown efficiency.

### Example 27—shRNA Knock Down of RMB20

[0327] TSA201 cells were co-transfected with RBM20-WT and six custom RBM20 shRNAs (sh1-6) or non-targeting scramble shRNA control (shCT). RBM20 expression normalized to GAPDH was measured by qRT-PCR. sh5 (5′-GGTCATTCACTCAGTC AAGCCCCACATTT-3; SEQ ID NO:48) (RNA sequence 5′-GGUCAUUCACUCAGU CAAGCCCCACAUUU-3; SEQ ID NO:49) had the strongest knockdown by raw value (FIG. 43), with about 82% knockdown efficiency.

### Example 28—shRNA Knock Down of CACNA1C

[0328] TSA201 cells were co-transfected with CACNA1C-WT and six custom CACNA1C shRNAs (sh1-6) or non-targeting scramble shRNA control (shCT). CACNA1C expression normalized to GAPDH was measured by qRT-PCR. sh1 (5′-GGAACGAGTGGAATATCTCTTTCTCATAA-3; SEQ ID NO:50) (RNA sequence 5′-GGAACGAGUGGAAUAUCUCUUUCUCAUAA-3; SEQ ID NO:51) had the strongest knockdown by raw value (FIG. 44), with about 92% knockdown efficiency.

### Example 29—Testing CALM1 shRNA

[0329] TSA201 cells were co-transfected with CALM1-WT and six custom CALM1 shRNAs (sh1-6) or non-targeting scramble shRNA control (shCT). CALM1 expression normalized to GAPDH was measured by qRT-PCR. Sh2 (5′-GAAAGATACAGATAGTGAAGAAGAA-3; SEQ ID NO:2738) (RNA sequence 5′-GAAAGAUACAGAUAGUGAAGAAGAA-3; SEQ ID NO:2739) had the strongest knockdown by raw value (FIG. 45), with about 89% knockdown efficiency.

### Example 30—Testing CALM2 shRNA

[0330] TSA201 cells were co-transfected with CALM2-WT and six custom CALM2 shRNAs (sh1-6) or non-targeting scramble shRNA control (shCT). CALM2 expression normalized to GAPDH was measured by qRT-PCR. Sh3 (5′-GCTGATGGTAATGGCACAATTGACT-3; SEQ ID NO:2740) (RNA sequence 5′-GCUGAUGGUAAUGGCACAAUUGACU-3; SEQ ID NO:2741) had the strongest knockdown by raw value (FIG. 46), with about 70% knockdown efficiency.

### Example 31—Testing CALM3 shRNA

[0331] TSA201 cells were co-transfected with CALM3-WT and six custom CALM3 shRNAs (sh1-6) or non-targeting scramble shRNA control (shCT). CALM3 expression normalized to GAPDH was measured by qRT-PCR. Sh6 (5′-GATGAGGAGGTGGATGAGATGATCA-3; SEQ ID NO:2742) (RNA sequence 5′-GAUGAGGAGGUGGAUGAGAUGAUCA-3; SEQ ID NO:2743) had the strongest knockdown by raw value (FIG. 47), with about 87% knockdown efficiency.

### Example 32—Testing KCNJ2 shRNA

[0332] TSA201 cells were co-transfected with KCNJ2-WT and six custom KCNJ2 shRNAs (sh1-6) or non-targeting scramble shRNA control (shCT). KCNJ2 expression normalized to GAPDH was measured by qRT-PCR. Sh5 (5′-GTGCCGTAGCTCTTATCTAGCAAATGAAA-3; SEQ ID NO:2744) (RNA sequence 5′-GUGCCGUAGCUCUUAUCUAGCAAAUGAAA-3; SEQ ID NO:2745) had the strongest knockdown by raw value (FIG. 48), with about 74% knockdown efficiency.

### Example 33—Testing CASQ2 shRNA

[0333] TSA201 cells were co-transfected with CASQ2-WT and six custom CASQ2 shRNAs (sh1-6) or non-targeting scramble shRNA control (shCT). CASQ2 expression normalized to GAPDH was measured by qRT-PCR. Sh2 (5′-AAGGAAGCCTGTATATTCTTA-3; SEQ ID NO:2746) (RNA sequence 5′-AAGGAAGCCUGUAUAUUCUUA-3; SEQ ID NO:2747) had the strongest knockdown by raw value (FIG. 49), with about 89% knockdown efficiency.

### Example 34—Testing DSG2 shRNA

[0334] TSA201 cells were co-transfected with DSG2-WT and six custom DSG2 shRNAs (sh1-6) or non-targeting scramble shRNA control (shCT). DSG2 expression normalized to GAPDH was measured by qRT-PCR. Sh5 (5′-GCAGTCTAGTAGGAAGAAATGGAGTAGGA-3; SEQ ID NO:2748) (RNA sequence 5′-GCAGUCUAGUAGGAAGAAAUGGAGUAGGA-3; SEQ ID NO:2749) had the strongest knockdown by raw value (FIG. 50), with about 70% knockdown efficiency.

### Example 35—Testing TNNT2 shRNA

[0335] TSA201 cells were co-transfected with TNNT2-WT and seven custom TNNT2 shRNAs (sh1-7) or non-targeting scramble shRNA control (shCT). TNNT2 expression normalized to GAPDH was measured by qRT-PCR. Sh4 (5′-GAAGAAGAAGAGGAAGCAAAG-3; SEQ ID NO:2750) (RNA sequence 5′-GAAGAAGAAGAGGAAGCAAAG-3; SEQ ID NO:2750) had the strongest knockdown by raw value (FIG. 51), with about 90% knockdown efficiency.

### Example 36—Testing TPM1 shRNA

[0336] TSA201 cells were co-transfected with TPM1-WT and six custom TPM1 shRNAs (sh1-6) or non-targeting scramble shRNA control (shCT). TPM1 expression normalized to GAPDH was measured by qRT-PCR. Sh2 (5′-AAGCTGAGAAGGCAGCAGATG-3; SEQ ID NO:2751) (RNA sequence 5′-AAGCUGAGAAGGCAGCAGAUG-3; SEQ ID NO:2752) had the strongest knockdown by raw value (FIG. 52), with about 85% knockdown efficiency.

### Example 37—Testing LMNA shRNA

[0337] TSA201 cells were co-transfected with LMNA-WT and six custom LMNA shRNAs (sh1-6) or non-targeting scramble shRNA control (shCT). LMNA expression normalized to GAPDH was measured by qRT-PCR. Sh5 (5′-GGCAGATCAAGCGCCAGAATGGAGATGA-3; SEQ ID NO:2753) (RNA sequence 5′-GGCAGAUCAAGCGCCAGAAUGGAGAUGA-3; SEQ ID NO:2754) had the strongest knockdown by raw value (FIG. 53), with about 75% knockdown efficiency.

### Example 38—Testing PLN shRNA

[0338] TSA201 cells were co-transfected with LMNA-WT and six custom PLN shRNAs (sh1-6) or non-targeting scramble shRNA control (shCT). PLN expression normalized to GAPDH was measured by qRT-PCR. Sh5 (5′-TGTCTCTTGCTGATCTGTATC-3; SEQ ID NO:2755) (RNA sequence 5′-UGUCUCUUGCUGAUCUGUAUC-3; SEQ ID NO:2756) had the strongest knockdown by raw value (FIG. 54), with about 80% knockdown efficiency.

### Other Embodiments

[0339] It is to be understood that while the invention has been described in conjunction with the detailed description thereof, the foregoing description is intended to illustrate and not limit the scope of the invention, which is defined by the scope of the appended claims. Other aspects, advantages, and modifications are within the scope of the following claims.

The application's sequence listing, which the Patent Office published only in electronic form, follows.

SEQUENCE LISTING (2784 sequences)

SEQ ID NO: 1 - DNA, 28 bp, Artificial Sequence
  Description of Artificial Sequence: Synthetic oligonucleotide
ggcacgcgtttatggccgcggcctcctc

SEQ ID NO: 2 - DNA, 39 bp, Artificial Sequence
  Description of Artificial Sequence: Synthetic oligonucleotide
gccggtctctgtacaccgctttacttgtacagctcgtcc

SEQ ID NO: 3 - DNA, 20 bp, Artificial Sequence
  Description of Artificial Sequence: Synthetic oligonucleotide
ctggcggtggatgaagacca

SEQ ID NO: 4 - DNA, 20 bp, Artificial Sequence
  Description of Artificial Sequence: Synthetic oligonucleotide
cccagcagtaggtgccccgt

SEQ ID NO: 5 - DNA, 114 bp, Artificial Sequence
  Description of Artificial Sequence: Synthetic polynucleotide
cagatcctgaggatgctacacgtcgaccgccagggaggcacctggaggctgctgggctcggtggtcttcatccaccgccaggtgggtggcccgggttaggggtgcggggcccag

SEQ ID NO: 6 - DNA, 116 bp, Artificial Sequence
  Description of Artificial Sequence: Synthetic polynucleotide
gtgcagccaccccaggaccccagctgtccaaggagccagggaaaacgcacacacggggcacctaccgctgggagcgcaaagaaggagatggcaaagacagagaagcaggaggcgat

SEQ ID NO: 7 - DNA, 29 bp, Homo sapiens
acggctatgacagttctgtaaggaagagc

SEQ ID NO: 8 - DNA, 36 bp, Homo sapiens
gtcgacggctatgacagttctgtaaggaagagccca

SEQ ID NO: 9 - DNA, 36 bp, Artificial Sequence
  Description of Artificial Sequence: Synthetic oligonucleotide
gtcgatggatacgatagctccgtcagaaaaagtcca

SEQ ID NO: 10 - protein, 12 aa, Homo sapiens
VDGYDSSVRKSP

SEQ ID NO: 11 - DNA, 65 bp, Artificial Sequence
  Description of Artificial Sequence: Synthetic oligonucleotide
gcactaccagagctaactcagatagtacttcaagagagtactatctgagttagctctggtagtgc

SEQ ID NO: 12 - DNA, 65 bp, Artificial Sequence
  Description of Artificial Sequence: Synthetic oligonucleotide
cactcattcagaccgcatggaggtgctattcaagagatagcacctccatgcggtctgaatgagtg

SEQ ID NO: 13 - DNA, 65 bp, Artificial Sequence
  Description of Artificial Sequence: Synthetic oligonucleotide
tgactcctggagagaagatgctcacagtctcaagaggactgtgagcatcttctctccaggagtca

SEQ ID NO: 14 - DNA, 65 bp, Artificial Sequence
  Description of Artificial Sequence: Synthetic oligonucleotide
agttctgtgaaacgctccagtggttacactcaagaggtgtaaccactggagcgtttcacagaact

SEQ ID NO: 15 - DNA, 65 bp, Artificial Sequence
  Description of Artificial Sequence: Synthetic oligonucleotide
acggctatgacagttctgtaaggaagagctcaagaggctcttccttacagaactgtcatagccgt

SEQ ID NO: 16 - RNA, 65 nt, Artificial Sequence
  Description of Artificial Sequence: Synthetic oligonucleotide
cacucauucagaccgcauggaggugcuauucaagagauagcaccuccaugcggucugaaugagug

SEQ ID NO: 17 - RNA, 65 nt, Artificial Sequence
  Description of Artificial Sequence: Synthetic oligonucleotide
ugacuccuggagagaagaugcucacagucucaagaggacugugagcaucuucucuccaggaguca

SEQ ID NO: 18 - RNA, 65 nt, Artificial Sequence
  Description of Artificial Sequence: Synthetic oligonucleotide
aguucugugaaacgcuccagugguuacacucaagagguguaaccacuggagcguuucacagaacu

SEQ ID NO: 19 - RNA, 65 nt, Artificial Sequence
  Description of Artificial Sequence: Synthetic oligonucleotide
acggcuaugacaguucuguaaggaagagcucaagaggcucuuccuuacagaacugucauagccgu

SEQ ID NO: 20 - DNA, 18 bp, Artificial Sequence
  Description of Artificial Sequence: Synthetic oligonucleotide
gagccacactctgctgtc

SEQ ID NO: 21 - DNA, 21 bp, Artificial Sequence
  Description of Artificial Sequence: Synthetic oligonucleotide
ggagagaagatgctcacagtc

SEQ ID NO: 22 - DNA, 30 bp, Artificial Sequence
  Description of Artificial Sequence: Synthetic oligonucleotide
gacggctatgacagttctgtaaggaagagc

SEQ ID NO: 23 - DNA, 30 bp, Artificial Sequence
  Description of Artificial Sequence: Synthetic oligonucleotide
tgtgagatgtgggtgatgggtgtcagcaga

SEQ ID NO: 24 - DNA, 30 bp, Artificial Sequence
  Description of Artificial Sequence: Synthetic oligonucleotide
gatggatacgatagctccgtcagaaaaagt

SEQ ID NO: 25 - DNA, 19 bp, Artificial Sequence
  Description of Artificial Sequence: Synthetic oligonucleotide
acatcgctcagacaccatg

SEQ ID NO: 26 - DNA, 22 bp, Artificial Sequence
  Description of Artificial Sequence: Synthetic oligonucleotide
tgtagttgaggtcaatgaaggg

SEQ ID NO: 27 - DNA, 29 bp, Homo sapiens
cacggagcagccaggggaggtgtcggcct

SEQ ID NO: 28 - RNA, 29 nt, Homo sapiens
cacggagcagccaggggaggugucggccu

SEQ ID NO: 29 - DNA, 29 bp, Artificial Sequence
  Description of Artificial Sequence: Synthetic oligonucleotide
taccgaacaacctggcgaagtctccgcgt

SEQ ID NO: 30 - DNA, 29 bp, Homo sapiens
ggttcactcgctcttcaacatgctcatca

SEQ ID NO: 31 - RNA, 29 nt, Homo sapiens
gguucacucgcucuucaacaugcucauca

SEQ ID NO: 32 - DNA, 29 bp, Artificial Sequence
  Description of Artificial Sequence: Synthetic oligonucleotide
cgtacattccctgtttaatatgctgatta

SEQ ID NO: 33 - DNA, 29 bp, Homo sapiens
gctgaaagcagagagagattatcacattt

SEQ ID NO: 34 - RNA, 29 nt, Homo sapiens
gcugaaagcagagagagauuaucacauuu

SEQ ID NO: 35 - DNA, 29 bp, Artificial Sequence
  Description of Artificial Sequence: Synthetic oligonucleotide
actcaaggctgaaagggactaccatatat

SEQ ID NO: 36 - DNA, 65 bp, Artificial Sequence
  Description of Artificial Sequence: Synthetic oligonucleotide
gttcaagctggacaaagacaatggggtgatcaagagtcaccccattgtctttgtccagcttgaac

SEQ ID NO: 37 - DNA, 65 bp, Artificial Sequence
  Description of Artificial Sequence: Synthetic oligonucleotide
gacagttctgtaaggaagagcccaacacttcaagagagtgttgggctcttccttacagaactgtc

SEQ ID NO: 38 - DNA, 65 bp, Artificial Sequence
  Description of Artificial Sequence: Synthetic oligonucleotide
agaccatcgcctcctgcttctctgtcttttcaagagaaagacagagaagcaggaggcgatggtct

SEQ ID NO: 39 - DNA, 65 bp, Artificial Sequence
  Description of Artificial Sequence: Synthetic oligonucleotide
cccaaacccaagaagtctgtggtggtaaatcaagagtttaccaccacagacttcttgggtttggg

SEQ ID NO: 40 - RNA, 65 nt, Artificial Sequence
  Description of Artificial Sequence: Synthetic oligonucleotide
guucaagcuggacaaagacaauggggugaucaagagucaccccauugucuuuguccagcuugaac

SEQ ID NO: 41 - RNA, 65 nt, Artificial Sequence
  Description of Artificial Sequence: Synthetic oligonucleotide
gacaguucuguaaggaagagcccaacacuucaagagaguguugggcucuuccuuacagaacuguc

SEQ ID NO: 42 - RNA, 65 nt, Artificial Sequence
  Description of Artificial Sequence: Synthetic oligonucleotide
agaccaucgccuccugcuucucugucuuuucaagagaaagacagagaagcaggaggcgauggucu

SEQ ID NO: 43 - RNA, 65 nt, Artificial Sequence
  Description of Artificial Sequence: Synthetic oligonucleotide
cccaaacccaagaagucuguggugguaaaucaagaguuuaccaccacagacuucuuggguuuggg

SEQ ID NO: 44 - DNA, 29 bp, Homo sapiens
gcactactgcatgattgacatagagaaga

SEQ ID NO: 45 - RNA, 29 nt, Homo sapiens
gcacuacugcaugauugacauagagaaga

SEQ ID NO: 46 - DNA, 29 bp, Homo sapiens
ggaggagaccttcaaataccggttcaaga

SEQ ID NO: 47 - RNA, 29 nt, Homo sapiens
ggaggagaccuucaaauaccgguucaaga

SEQ ID NO: 48 - DNA, 29 bp, Homo sapiens
ggtcattcactcagtcaagccccacattt

SEQ ID NO: 49 - RNA, 29 nt, Homo sapiens
ggucauucacucagucaagccccacauuu

SEQ ID NO: 50 - DNA, 29 bp, Homo sapiens
ggaacgagtggaatatctctttctcataa

SEQ ID NO: 51 - RNA, 29 nt, Homo sapiens
ggaacgaguggaauaucucuuucucauaa

SEQ ID NO: 52 - DNA, 21 bp, Homo sapiens
gcagagctcccagagaaatat

SEQ ID NO: 53 - RNA, 21 nt, Homo sapiens
gcagagcucccagagaaauau

SEQ ID NO: 54 - DNA, 25 bp, Homo sapiens
ggctggaaatgcttcgtttaccact

SEQ ID NO: 55 - DNA, 25 bp, Artificial Sequence
  Description of Artificial Sequence: Synthetic oligonucleotide
gggtggaagtgttttgtatatcatt

SEQ ID NO: 56 - DNA, 25 bp, Homo sapiens
gctggaaatgcttcgtttaccactt

SEQ ID NO: 57 - DNA, 25 bp, Artificial Sequence
  Description of Artificial Sequence: Synthetic oligonucleotide
ggtggaagtgttttgtatatcattt

SEQ ID NO: 58 - DNA, 21 bp, Homo sapiens
ggaaatgcttcgtttaccact

SEQ ID NO: 59 - DNA, 21 bp, Artificial Sequence
  Description of Artificial Sequence: Synthetic oligonucleotide
ggaagtgttttgtatatcatt

SEQ ID NO: 60 - DNA, 19 bp, Homo sapiens
ggaaatgcttcgtttacca

SEQ ID NO: 61 - DNA, 19 bp, Artificial Sequence
  Description of Artificial Sequence: Synthetic oligonucleotide
ggaagtgttttgtatatca

SEQ ID NO: 62 - DNA, 21 bp, Homo sapiens
gaaatgcttcgtttaccactt

SEQ ID NO: 63 - DNA, 21 bp, Artificial Sequence
  Description of Artificial Sequence: Synthetic oligonucleotide
gaagtgttttgtatatcattt

SEQ ID NO: 64 - DNA, 29 bp, Homo sapiens
ttcctcatcgtcctggtctgcctcatctt

SEQ ID NO: 65 - DNA, 29 bp, Artificial Sequence
  Description of Artificial Sequence: Synthetic oligonucleotide
tttctgattgtgctcgtgtgtctgatttt

SEQ ID NO: 66 - DNA, 29 bp, Homo sapiens
gcgtgctgtccaccatcgagcagtatgcc

SEQ ID NO: 67 - DNA, 29 bp, Artificial Sequence
  Description of Artificial Sequence: Synthetic oligonucleotide
gtgtcctctcgacgattgaacaatacgcg

SEQ ID NO: 68 - DNA, 19 bp, Homo sapiens
gtccaccatcgagcagtat

SEQ ID NO: 69 - DNA, 19 bp, Artificial Sequence
  Description of Artificial Sequence: Synthetic oligonucleotide
ctcgacgattgaacaatac

SEQ ID NO: 70 - DNA, 21 bp, Homo sapiens
tccaccatcgagcagtatgcc

SEQ ID NO: 71 - DNA, 21 bp, Artificial Sequence
  Description of Artificial Sequence: Synthetic oligonucleotide
tcgacgattgaacaatacgcg

SEQ ID NO: 72 - DNA, 29 bp, Homo sapiens
gtgttcttcgggacggagtacgtggtccg

SEQ ID NO: 73 - DNA, 29 bp, Artificial Sequence
  Description of Artificial Sequence: Synthetic oligonucleotide
gtcttttttggcaccgaatatgtcgtgcg

SEQ ID NO: 74 - DNA, 29 bp, Homo sapiens
ctcatcgtggtcgtggcctccatggtggt

SEQ ID NO: 75 - DNA, 29 bp, Artificial Sequence
  Description of Artificial Sequence: Synthetic oligonucleotide
ctgattgtcgtggtcgcgtcgatggtcgt

SEQ ID NO: 76 - DNA, 29 bp, Homo sapiens
gggcaggtgtttgccacgtcggccatcag

SEQ ID NO: 77 - DNA, 29 bp, Artificial Sequence
  Description of Artificial Sequence: Synthetic oligonucleotide
ggccaagtcttcgcgacctccgcgattag

SEQ ID NO: 78 - DNA, 29 bp, Homo sapiens
accgccagggaggcacctggaggctcctg

SEQ ID NO: 79 - DNA, 29 bp, Artificial Sequence
  Description of Artificial Sequence: Synthetic oligonucleotide
atcggcaaggtgggacgtggagactgctc

SEQ ID NO: 80 - DNA, 29 bp, Homo sapiens
tggtcttcatccaccgccaggagctgata

SEQ ID NO: 81 - DNA, 29 bp, Artificial Sequence
  Description of Artificial Sequence: Synthetic oligonucleotide
tcgtgtttattcatcggcaagaactcatt

SEQ ID NO: 82 - DNA, 21 bp, Homo sapiens
tggtcttcatccaccgccagg

SEQ ID NO: 83 - DNA, 21 bp, Artificial Sequence
  Description of Artificial Sequence: Synthetic oligonucleotide
tcgtgtttattcatcggcaag

SEQ ID NO: 84 - DNA, 21 bp, Homo sapiens
gctgataaccaccctgtacat

SEQ ID NO: 85 - DNA, 21 bp, Artificial Sequence
  Description of Artificial Sequence: Synthetic oligonucleotide
actcattacgacgctctatat

SEQ ID NO: 86 - DNA, 29 bp, Homo sapiens
accaccctgtacatcggcttcctgggcct

SEQ ID NO: 87 - DNA, 29 bp, Artificial Sequence
  Description of Artificial Sequence: Synthetic oligonucleotide
acgacgctctatattgggtttctcgggct

SEQ ID NO: 88 - DNA, 21 bp, Homo sapiens
accaccctgtacatcggcttc

SEQ ID NO: 89 - DNA, 21 bp, Artificial Sequence
  Description of Artificial Sequence: Synthetic oligonucleotide
acgacgctctatattgggttt

SEQ ID NO: 90 - DNA, 29 bp, Homo sapiens
ctggctgagaaggacgcggtgaacgagtc

SEQ ID NO: 91 - DNA, 29 bp, Artificial Sequence
  Description of Artificial Sequence: Synthetic oligonucleotide
ctcgcagaaaaagatgccgtcaatgaatc

SEQ ID NO: 92 - DNA, 29 bp, Homo sapiens
ctgtggtggggggtggtcacagtcaccac

SEQ ID NO: 93 - DNA, 29 bp, Artificial Sequence
  Description of Artificial Sequence: Synthetic oligonucleotide
ctctggtggggcgtcgtgactgtgacgac

SEQ ID NO: 94 - DNA, 29 bp, Homo sapiens
agaccatcgcctcctgcttctctgtcttt

SEQ ID NO: 95 - DNA, 29 bp, Artificial Sequence
  Description of Artificial Sequence: Synthetic oligonucleotide
aaacgattgcgtcgtgtttttcagtgttc

SEQ ID NO: 96 - DNA, 29 bp, Homo sapiens
agcagaagcagaggcagaagcacttcaac

SEQ ID NO: 97 - DNA, 29 bp, Artificial Sequence
  Description of Artificial Sequence: Synthetic oligonucleotide
aacaaaaacaaagacaaaaacattttaat

SEQ ID NO: 98 - DNA, 21 bp, Homo sapiens
gaagcagaggcagaagcactt

SEQ ID NO: 99 - DNA, 21 bp, Artificial Sequence
  Description of Artificial Sequence: Synthetic oligonucleotide
aaaacaaagacaaaaacattt

SEQ ID NO: 100 - DNA, 29 bp, Homo sapiens
cccaaacccaagaagtctgtggtggtaaa

SEQ ID NO: 101 - DNA, 29 bp, Artificial Sequence
  Description of Artificial Sequence: Synthetic oligonucleotide
ccgaagccgaaaaaatcagtcgtcgttaa

SEQ ID NO: 102 - DNA, 29 bp, Homo sapiens
gttcaagctggacaaagacaatggggtga

SEQ ID NO: 103 - DNA, 29 bp, Artificial Sequence
  Description of Artificial Sequence: Synthetic oligonucleotide
atttaaactcgataaggataacggcgtca

SEQ ID NO: 104 - DNA, 21 bp, Homo sapiens
gttcaagctggacaaagacaa

SEQ ID NO: 105 - DNA, 21 bp, Artificial Sequence
  Description of Artificial Sequence: Synthetic oligonucleotide
atttaaactcgataaggataa

SEQ ID NO: 106 - DNA, 21 bp, Homo sapiens
tggacaaagacaatggggtga

SEQ ID NO: 107 - DNA, 21 bp, Artificial Sequence
  Description of Artificial Sequence: Synthetic oligonucleotide
tcgataaggataacggcgtca

SEQ ID NO: 108 - DNA, 19 bp, Homo sapiens
gagagaagatgctcacagt

SEQ ID NO: 109 - DNA, 19 bp, Artificial Sequence
  Description of Artificial Sequence: Synthetic oligonucleotide
gtgaaaaaatgctgactgt

SEQ ID NO: 110 - DNA, 29 bp, Homo sapiens
gacagttctgtaaggaagagcccaacact

SEQ ID NO: 111 - DNA, 29 bp, Artificial Sequence
  Description of Artificial Sequence: Synthetic oligonucleotide
gatagctcagttagaaaaagtcctactct

SEQ ID NO: 112 - DNA, 25 bp, Homo sapiens
gttctgtaaggaagagcccaacact

SEQ ID NO: 113 - DNA, 25 bp, Artificial Sequence
  Description of Artificial Sequence: Synthetic oligonucleotide
gctcagttagaaaaagtcctactct

SEQ ID NO: 114 - DNA, 29 bp, Homo sapiens
gcccaacactgctggaagtgagcatgccc

SEQ ID NO: 115 - DNA, 29 bp, Artificial Sequence
  Description of Artificial Sequence: Synthetic oligonucleotide
gtcctactctcctcgaggtcagtatgccg

SEQ ID NO: 116 - DNA, 21 bp, Homo sapiens
gcccaacactgctggaagtga

SEQ ID NO: 117 - DNA, 21 bp, Artificial Sequence
  Description of Artificial Sequence: Synthetic oligonucleotide
gtcctactctcctcgaggtca

SEQ ID NO: 118 - DNA, 29 bp, Homo sapiens
tgagaaccaacagcttcgccgaggacctg

SEQ ID NO: 119 - DNA, 29 bp, Artificial Sequence
  Description of Artificial Sequence: Synthetic oligonucleotide
tgaggacgaatagttttgcggaagatctc

SEQ ID NO: 120 - DNA, 19 bp, Homo sapiens
gggccaccattaaggtcat

SEQ ID NO: 121 - DNA, 19 bp, Artificial Sequence
  Description of Artificial Sequence: Synthetic oligonucleotide
gcgcgacgataaaagtgat

SEQ ID NO: 122 - DNA, 19 bp, Homo sapiens
ggccaccattaaggtcatt

SEQ ID NO: 123 - DNA, 19 bp, Artificial Sequence
  Description of Artificial Sequence: Synthetic oligonucleotide
cgcgacgataaaagtgata

SEQ ID NO: 124 - DNA, 29 bp, Homo sapiens
cgcatgcagtactttgtggccaagaagaa

SEQ ID NO: 125 - DNA, 29 bp, Artificial Sequence
  Description of Artificial Sequence: Synthetic oligonucleotide
cggatgcaatatttcgtcgcgaaaaaaaa

SEQ ID NO: 126 - DNA, 29 bp, Homo sapiens
aagaaattccagcaagcgcggaagcctta

SEQ ID NO: 127 - DNA, 29 bp, Artificial Sequence
  Description of Artificial Sequence: Synthetic oligonucleotide
aaaaagtttcaacaggcccgcaaaccata

SEQ ID NO: 128 - DNA, 29 bp, Homo sapiens
agggccacctcaacctcatggtgcgcatc

SEQ ID NO: 129 - DNA, 29 bp, Artificial Sequence
  Description of Artificial Sequence: Synthetic oligonucleotide
aagggcatctgaatctgatggtccggatt

SEQ ID NO: 130 - DNA, 29 bp, Homo sapiens
gtccattgggaagccctcactgttcatct

SEQ ID NO: 131 - DNA, 29 bp, Artificial Sequence
  Description of Artificial Sequence: Synthetic oligonucleotide
atcgataggcaaaccgtctctctttattt

SEQ ID NO: 132 - DNA, 21 bp, Homo sapiens
ggaagccctcactgttcatct

SEQ ID NO: 133 - DNA, 21 bp, Artificial Sequence
  Description of Artificial Sequence: Synthetic oligonucleotide
gcaaaccgtctctctttattt

SEQ ID NO: 134 - DNA, 19 bp, Homo sapiens
gcctgaaccgagtagaaga

SEQ ID NO: 135 - DNA, 19 bp, Artificial Sequence
  Description of Artificial Sequence: Synthetic oligonucleotide
ggctcaatcgtgttgagga

SEQ ID NO: 136 - DNA, 29 bp, Homo sapiens
gaagacaaggtgacgcagctggaccagag

SEQ ID NO: 137 - DNA, 29 bp, Artificial Sequence
  Description of Artificial Sequence: Synthetic oligonucleotide
gaggataaagtcacccaactcgatcaaag

SEQ ID NO: 138 - DNA, 29 bp, Homo sapiens
caccttcctggacaccatcatccgcaagt

SEQ ID NO: 139 - DNA, 29 bp, Artificial Sequence
  Description of Artificial Sequence: Synthetic oligonucleotide
tacgtttctcgatacgattattcggaaat

SEQ ID NO: 140 - DNA, 21 bp, Homo sapiens
caccttcctggacaccatcat

SEQ ID NO: 141 - DNA, 21 bp, Artificial Sequence
  Description of Artificial Sequence: Synthetic oligonucleotide
tacgtttctcgatacgattat

SEQ ID NO: 142 - DNA, 21 bp, Homo sapiens
tggacaccatcatccgcaagt

SEQ ID NO: 143 - DNA, 21 bp, Artificial Sequence
  Description of Artificial Sequence: Synthetic oligonucleotide
tcgatacgattattcggaaat

SEQ ID NO: 144 - DNA, 29 bp, Homo sapiens
tgggcgccgaggagcgcaaagtggaaatc

SEQ ID NO: 145 - DNA, 29 bp, Artificial Sequence
  Description of Artificial Sequence: Synthetic oligonucleotide
tcggggcggaagaacggaaggtcgagatt

SEQ ID NO: 146 - DNA, 21 bp, Homo sapiens
gatgggagctgcttcctatgt

SEQ ID NO: 147 - DNA, 21 bp, Artificial Sequence
  Description of Artificial Sequence: Synthetic oligonucleotide
gacggcagttgttttctttgc

SEQ ID NO: 148 - DNA, 19 bp, Homo sapiens
ggagctgcttcctatgtct

SEQ ID NO: 149 - DNA, 19 bp, Artificial Sequence
  Description of Artificial Sequence: Synthetic oligonucleotide
gcagttgttttctttgcct

SEQ ID NO: 150 - DNA, 19 bp, Homo sapiens
gggctgtcatcatgttcat

SEQ ID NO: 151 - DNA, 19 bp, Artificial Sequence
  Description of Artificial Sequence: Synthetic oligonucleotide
gcgcagtgattatgtttat

SEQ ID NO: 152 - DNA, 25 bp, Homo sapiens
gctgtcatcatgttcatcctcaatt

SEQ ID NO: 153 - DNA, 25 bp, Artificial Sequence
  Description of Artificial Sequence: Synthetic oligonucleotide
gcagtgattatgtttattctgaact

SEQ ID NO: 154 - DNA, 29 bp, Homo sapiens
tcgtgcgctaccgcaccattagcaagatt

SEQ ID NO: 155 - DNA, 29 bp, Artificial Sequence
  Description of Artificial Sequence: Synthetic oligonucleotide
tggtccggtatcggacgataagtaaaata

SEQ ID NO: 156 - DNA, 29 bp, Homo sapiens
atcaccctcaactttgtggacctcaaggg

SEQ ID NO: 157 - DNA, 29 bp, Artificial Sequence
  Description of Artificial Sequence: Synthetic oligonucleotide
attacgctgaatttcgtcgatctgaaagg

SEQ ID NO: 158 - DNA, 29 bp, Homo sapiens
gtgaccgtgagatcatagcacctaagata

SEQ ID NO: 159 - DNA, 29 bp, Artificial Sequence
  Description of Artificial Sequence: Synthetic oligonucleotide
gcgatcgagaaattattgctccaaaaatt

SEQ ID NO: 160 - DNA, 21 bp, Homo sapiens
gatcatagcacctaagataaa

SEQ ID NO: 161 - DNA, 21 bp, Artificial Sequence
  Description of Artificial Sequence: Synthetic oligonucleotide
aattattgctccaaaaattaa

SEQ ID NO: 162 - DNA, 19 bp, Homo sapiens
gatcatagcacctaagata

SEQ ID NO: 163 - DNA, 19 bp, Artificial Sequence
  Description of Artificial Sequence: Synthetic oligonucleotide
aattattgctccaaaaatt

SEQ ID NO: 164 - DNA, 19 bp, Homo sapiens
gagcgaacccacaatgtca

SEQ ID NO: 165 - DNA, 19 bp, Artificial Sequence
  Description of Artificial Sequence: Synthetic oligonucleotide
gaacgtacgcataacgtga

SEQ ID NO: 166 - DNA, 29 bp, Homo sapiens
gtgggactggctcatcctgctgctggtca

SEQ ID NO: 167 - DNA, 29 bp, Artificial Sequence
  Description of Artificial Sequence: Synthetic oligonucleotide
ctgggattggctgattctcctcctcgtga

SEQ ID NO: 168 - DNA, 21 bp, Homo sapiens
ggtcatctacacggctgtctt

SEQ ID NO: 169 - DNA, 21 bp, Artificial Sequence
  Description of Artificial Sequence: Synthetic oligonucleotide
cgtgatttataccgcagtgtt

SEQ ID NO: 170 - DNA, 19 bp, Homo sapiens
gtggacatcctcatcaact

SEQ ID NO: 171 - DNA, 19 bp, Artificial Sequence
  Description of Artificial Sequence: Synthetic oligonucleotide
gtcgatattctgattaatt

SEQ ID NO: 172 - DNA, 29 bp, Homo sapiens
gacatcctcatcaacttccgcaccaccta

SEQ ID NO: 173 - DNA, 29 bp, Artificial Sequence
  Description of Artificial Sequence: Synthetic oligonucleotide
gatattctgattaattttcggacgacgta

SEQ ID NO: 174 - DNA, 21 bp, Homo sapiens
gaagctggatcgctactcaga

SEQ ID NO: 175 - DNA, 21 bp, Artificial Sequence
  Description of Artificial Sequence: Synthetic oligonucleotide
caaactcgaccggtattctga

SEQ ID NO: 176 - DNA, 19 bp, Homo sapiens
gaagctggatcgctactca

SEQ ID NO: 177 - DNA, 19 bp, Artificial Sequence
  Description of Artificial Sequence: Synthetic oligonucleotide
caaactcgaccggtattct

SEQ ID NO: 178 - DNA, 25 bp, Homo sapiens
gcccctccatcaaggacaagtatgt

SEQ ID NO: 179 - DNA, 25 bp, Artificial Sequence
  Description of Artificial Sequence: Synthetic oligonucleotide
ggccgtcgattaaagataaatacgt

SEQ ID NO: 180 - DNA, 29 bp, Homo sapiens
ctgacatctgcctgcacctgaaccgctca

SEQ ID NO: 181 - DNA, 29 bp, Artificial Sequence
  Description of Artificial Sequence: Synthetic oligonucleotide
cagatatttgtctccatctcaatcggtct

SEQ ID NO: 182 - DNA, 29 bp, Homo sapiens
ctgacatctgcctgcacctgaaccgctca

SEQ ID NO: 183 - DNA, 29 bp, Artificial Sequence
  Description of Artificial Sequence: Synthetic oligonucleotide
cagatatttgtctccatctcaatcggtct

SEQ ID NO: 184 - DNA, 29 bp, Homo sapiens
tgaagttcaagaccacacatgcaccgcca

SEQ ID NO: 185 - DNA, 29 bp, Artificial Sequence
  Description of Artificial Sequence: Synthetic oligonucleotide
tgaaatttaaaacgactcacgctccccct

SEQ ID NO: 186 - DNA, 29 bp, Homo sapiens
cttctggtccagcctggagatcaccttca

SEQ ID NO: 187 - DNA, 29 bp, Artificial Sequence
  Description of Artificial Sequence: Synthetic oligonucleotide
tttttggtcgagtctcgaaattacgttta

SEQ ID NO: 188 - DNA, 21 bp, Homo sapiens
cacggagcagccaggggaggt

SEQ ID NO: 189 - DNA, 21 bp, Artificial Sequence
  Description of Artificial Sequence: Synthetic oligonucleotide
taccgaacaacctggcgaagt

SEQ ID NO: 190 - DNA, 21 bp, Homo sapiens
agccaggggaggtgtcggcct

SEQ ID NO: 191 - DNA, 21 bp, Artificial Sequence
  Description of Artificial Sequence: Synthetic oligonucleotide
aacctggcgaagtctccgcgt

SEQ ID NO: 192 - DNA, 29 bp, Homo sapiens
ctgcagctgctacagaggcagatgacgct

SEQ ID NO: 193 - DNA, 29 bp, Artificial Sequence
  Description of Artificial Sequence: Synthetic oligonucleotide
ctccaactccttcaaagacaaatgaccct

SEQ ID NO: 194 - DNA, 29 bp, Homo sapiens
cgacgcctctccctaccgggccagctggg

SEQ ID NO: 195 - DNA, 29 bp, Artificial Sequence
  Description of Artificial Sequence: Synthetic oligonucleotide
cgtcggctgtcgcttcccgggcaactcgg

SEQ ID NO: 196 - DNA, 29 bp, Homo sapiens
cgacgcctctccctaccgggccagctggg

SEQ ID NO: 197 - DNA, 29 bp, Artificial Sequence
  Description of Artificial Sequence: Synthetic oligonucleotide
cgtcggctgtcgcttcccgggcaactcgg

SEQ ID NO: 198 - DNA, 19 bp, Homo sapiens
ggcaaacttcctattacct

SEQ ID NO: 199 - DNA, 19 bp, Artificial Sequence
  Description of Artificial Sequence: Synthetic oligonucleotide
ggctaattttcttttgcca

SEQ ID NO: 200 - DNA, 19 bp, Homo sapiens
gaccatcttccggttcagt

SEQ ID NO: 201 - DNA, 19 bp, Artificial Sequence
  Description of Artificial Sequence: Synthetic oligonucleotide
aacgatttttcgctttagc

SEQ ID NO: 202 - DNA, 25 bp, Homo sapiens
gttcagtgccaccaacgccttgtat

SEQ ID NO: 203 - DNA, 25 bp, Artificial Sequence
  Description of Artificial Sequence: Synthetic oligonucleotide
ctttagcgcgacgaatgcgttatac

SEQ ID NO: 204 - DNA, 21 bp, Homo sapiens
ggttcactcgctcttcaacat

SEQ ID NO: 205 - DNA, 21 bp, Artificial Sequence
  Description of Artificial Sequence: Synthetic oligonucleotide
cgtacattccctgtttaatat

SEQ ID NO: 206 - DNA, 29 bp, Homo sapiens
gttcactcgctcttcaacatgctcatcat

SEQ ID NO: 207 - DNA, 29 bp, Artificial Sequence
  Description of Artificial Sequence: Synthetic oligonucleotide
gtacattccctgtttaatatgctgattat

SEQ ID NO: 208 - DNA, 21 bp, Homo sapiens
gctcttcaacatgctcatcat

SEQ ID NO: 209 - DNA, 21 bp, Artificial Sequence
  Description of Artificial Sequence: Synthetic oligonucleotide
cctgtttaatatgctgattat

SEQ ID NO: 210 - DNA, 29 bp, Homo sapiens
gctcttcatgggcaacctaaggcacaagt

SEQ ID NO: 211 - DNA, 29 bp, Artificial Sequence
  Description of Artificial Sequence: Synthetic oligonucleotide
actgtttatggggaatcttagacataaat

SEQ ID NO: 212 - DNA, 19 bp, Homo sapiens
ggcaacctaaggcacaagt

SEQ ID NO: 213 - DNA, 19 bp, Artificial Sequence
  Description of Artificial Sequence: Synthetic oligonucleotide
gggaatcttagacataaat

SEQ ID NO: 214 - DNA, 21 bp, Homo sapiens
ggaatccctggacctttacct

SEQ ID NO: 215 - DNA, 21 bp, Artificial Sequence
  Description of Artificial Sequence: Synthetic oligonucleotide
ggagtcgctcgatctatatct

SEQ ID NO: 216 - DNA, 19 bp, Homo sapiens
ggacctttacctcagtgat

SEQ ID NO: 217 - DNA, 19 bp, Artificial Sequence
  Description of Artificial Sequence: Synthetic oligonucleotide
cgatctatatctgagcgac

SEQ ID NO: 218 - DNA, 19 bp, Homo sapiens
gggcctttcttgcactctt

SEQ ID NO: 219 - DNA, 19 bp, Artificial Sequence
  Description of Artificial Sequence: Synthetic oligonucleotide
gggcgttcctagctctgtt

SEQ ID NO: 220 - DNA, 21 bp, Homo sapiens
gatcttcttcatgcttgtcat

SEQ ID NO: 221 - DNA, 21 bp, Artificial Sequence
  Description of Artificial Sequence: Synthetic oligonucleotide
gattttttttatgctagtgat

SEQ ID NO: 222 - DNA, 25 bp, Homo sapiens
ggaggccatggaaatgctcaagaaa

SEQ ID NO: 223 - DNA, 25 bp, Artificial Sequence
  Description of Artificial Sequence: Synthetic oligonucleotide
agaagcgatggagatgctgaaaaag

SEQ ID NO: 224 - DNA, 21 bp, Homo sapiens
ggccatggaaatgctcaagaa

SEQ ID NO: 225 - DNA, 21 bp, Artificial Sequence
  Description of Artificial Sequence: Synthetic oligonucleotide
agcgatggagatgctgaaaaa

SEQ ID NO: 226 - DNA, 21 bp, Homo sapiens
gccatggaaatgctcaagaaa

SEQ ID NO: 227 - DNA, 21 bp, Artificial Sequence
  Description of Artificial Sequence: Synthetic oligonucleotide
gcgatggagatgctgaaaaag

SEQ ID NO: 228 - DNA, 19 bp, Homo sapiens
gccatggaaatgctcaaga

SEQ ID NO: 229 - DNA, 19 bp, Artificial Sequence
  Description of Artificial Sequence: Synthetic oligonucleotide
gcgatggagatgctgaaaa

SEQ ID NO: 230 - DNA, 25 bp, Homo sapiens
gccccagtaaacagccatgagagaa

SEQ ID NO: 231 - DNA, 25 bp, Artificial Sequence
  Description of Artificial Sequence: Synthetic oligonucleotide
gcgcctgttaatagtcacgaaagga

SEQ ID NO: 232 - DNA, 21 bp, Homo sapiens
gatggtcccagagcaatgaat

SEQ ID NO: 233 - DNA, 21 bp, Artificial Sequence
  Description of Artificial Sequence: Synthetic oligonucleotide
gacggaccgagggctatgaac

SEQ ID NO: 234 - DNA, 19 bp, Homo sapiens
gtcccagagcaatgaatca

SEQ ID NO: 235 - DNA, 19 bp, Artificial Sequence
  Description of Artificial Sequence: Synthetic oligonucleotide
gaccgagggctatgaacca

SEQ ID NO: 236 - DNA, 29 bp, Homo sapiens
ggaagagttagaggagtctcgccacaagt

SEQ ID NO: 237 - DNA, 29 bp, Artificial Sequence
  Description of Artificial Sequence: Synthetic oligonucleotide
cgaggaattggaagaatcacggcataaat

SEQ ID NO: 238 - DNA, 19 bp, Homo sapiens
ggaagagttagaggagtct

SEQ ID NO: 239 - DNA, 19 bp, Artificial Sequence
  Description of Artificial Sequence: Synthetic oligonucleotide
cgaggaattggaagaatca

SEQ ID NO: 240 - DNA, 21 bp, Homo sapiens
gtccatcaagcagggagtgaa

SEQ ID NO: 241 - DNA, 21 bp, Artificial Sequence
  Description of Artificial Sequence: Synthetic oligonucleotide
gtcgattaaacaaggtgtcaa

SEQ ID NO: 242 - DNA, 19 bp, Homo sapiens
gacctcaccatcactatgt

SEQ ID NO: 243 - DNA, 19 bp, Artificial Sequence
  Description of Artificial Sequence: Synthetic oligonucleotide
gatctgacgattacaatgt

SEQ ID NO: 244 - DNA, 25 bp, Homo sapiens
gcgctggagcactacaacatgacaa

SEQ ID NO: 245 - DNA, 25 bp, Artificial Sequence
  Description of Artificial Sequence: Synthetic oligonucleotide
gccctcgaacattataatatgacta

SEQ ID NO: 246 - DNA, 25 bp, Homo sapiens
gctggagcactacaacatgacaagt

SEQ ID NO: 247 - DNA, 25 bp, Artificial Sequence
  Description of Artificial Sequence: Synthetic oligonucleotide
cctcgaacattataatatgactagc

SEQ ID NO: 248 - DNA, 19 bp, Homo sapiens
ggagcactacaacatgaca

SEQ ID NO: 249 - DNA, 19 bp, Artificial Sequence
  Description of Artificial Sequence: Synthetic oligonucleotide
cgaacattataatatgact

SEQ ID NO: 250 - DNA, 21 bp, Homo sapiens
gagcactacaacatgacaagt

SEQ ID NO: 251 - DNA, 21 bp, Artificial Sequence
  Description of Artificial Sequence: Synthetic oligonucleotide
gaacattataatatgactagc

SEQ ID NO: 252 - DNA, 19 bp, Homo sapiens
gagcactacaacatgacaa

SEQ ID NO: 253 - DNA, 19 bp, Artificial Sequence
  Description of Artificial Sequence: Synthetic oligonucleotide
gaacattataatatgacta

SEQ ID NO: 254 - DNA, 19 bp, Homo sapiens
gcactacaacatgacaagt

SEQ ID NO: 255 - DNA, 19 bp, Artificial Sequence
  Description of Artificial Sequence: Synthetic oligonucleotide
acattataatatgactagc

SEQ ID NO: 256 - DNA, 21 bp, Homo sapiens
gacaagtgaattcgaggagat

SEQ ID NO: 257 - DNA, 21 bp, Artificial Sequence
  Description of Artificial Sequence: Synthetic oligonucleotide
gactagcgagtttgaagaaat

SEQ ID NO: 258 - DNA, 21 bp, Homo sapiens
gtcggaaacctggtcttcaca

SEQ ID NO: 259 - DNA, 21 bp, Artificial Sequence
  Description of Artificial Sequence: Synthetic oligonucleotide
gtgggtaatctcgtgtttact

SEQ ID NO: 260 - DNA, 19 bp, Homo sapiens
gtcggaaacctggtcttca

SEQ ID NO: 261 - DNA, 19 bp, Artificial Sequence
  Description of Artificial Sequence: Synthetic oligonucleotide
gtgggtaatctcgtgttta

SEQ ID NO: 262 - DNA, 25 bp, Homo sapiens
gctggcacatgatggacttctttca

SEQ ID NO: 263 - DNA, 25 bp, Artificial Sequence
  Description of Artificial Sequence: Synthetic oligonucleotide
ggtggcatatgatggattttttcca

SEQ ID NO: 264 - DNA, 21 bp, Homo sapiens
gctggcacatgatggacttct

SEQ ID NO: 265 - DNA, 21 bp, Artificial Sequence
  Description of Artificial Sequence: Synthetic oligonucleotide
ggtggcatatgatggattttt

SEQ ID NO: 266 - DNA, 19 bp, Homo sapiens
gctggcacatgatggactt

SEQ ID NO: 267 - DNA, 19 bp, Artificial Sequence
  Description of Artificial Sequence: Synthetic oligonucleotide
ggtggcatatgatggattt

SEQ ID NO: 268 - DNA, 19 bp, Homo sapiens
ggcacatgatggacttctt

SEQ ID NO: 269 - DNA, 19 bp, Artificial Sequence
  Description of Artificial Sequence: Synthetic oligonucleotide
ggcatatgatggatttttt

SEQ ID NO: 270 - DNA, 21 bp, Homo sapiens
gcacatgatggacttctttca

SEQ ID NO: 271 - DNA, 21 bp, Artificial Sequence
  Description of Artificial Sequence: Synthetic oligonucleotide
gcatatgatggattttttcca

SEQ ID NO: 272 - DNA, 19 bp, Homo sapiens
gcacatgatggacttcttt

SEQ ID NO: 273 - DNA, 19 bp, Artificial Sequence
  Description of Artificial Sequence: Synthetic oligonucleotide
gcatatgatggattttttc

SEQ ID NO: 274 - DNA, 25 bp, Homo sapiens
gcctgctggtcttcttgcttgttat

SEQ ID NO: 275 - DNA, 25 bp, Artificial Sequence
  Description of Artificial Sequence: Synthetic oligonucleotide
gtctcctcgtgtttttactagtaat

SEQ ID NO: 276 - DNA, 21 bp, Homo sapiens
gctggtcttcttgcttgttat

SEQ ID NO: 277 - DNA, 21 bp, Artificial Sequence
  Description of Artificial Sequence: Synthetic oligonucleotide
cctcgtgtttttactagtaat

SEQ ID NO: 278 - DNA, 29 bp, Homo sapiens
gcccctgatgaggacagagagatgaacaa

SEQ ID NO: 279 - DNA, 29 bp, Artificial Sequence
  Description of Artificial Sequence: Synthetic oligonucleotide
gcgccagacgaagatagggaaatgaataa

SEQ ID NO: 280 - DNA, 19 bp, Homo sapiens
ggaagaccatcaaggttct

SEQ ID NO: 281 - DNA, 19 bp, Artificial Sequence
  Description of Artificial Sequence: Synthetic oligonucleotide
gcaaaacgattaaagtact

SEQ ID NO: 282 - DNA, 21 bp, Homo sapiens
gcctcatcttctggctcatct

SEQ ID NO: 283 - DNA, 21 bp, Artificial Sequence
  Description of Artificial Sequence: Synthetic oligonucleotide
gtctgattttttggctgattt

SEQ ID NO: 284 - DNA, 21 bp, Homo sapiens
gccagtgtgagtccttgaact

SEQ ID NO: 285 - DNA, 21 bp, Artificial Sequence
  Description of Artificial Sequence: Synthetic oligonucleotide
gtcaatgcgaatcgttaaatt

SEQ ID NO: 286 - DNA, 25 bp, Homo sapiens
gcccttctgcaggtggcaacattta

SEQ ID NO: 287 - DNA, 25 bp, Artificial Sequence
  Description of Artificial Sequence: Synthetic oligonucleotide
gcgctactccaagtcgctactttca

SEQ ID NO: 288 - DNA, 19 bp, Homo sapiens
gcaggtggcaacatttaaa

SEQ ID NO: 289 - DNA, 19 bp, Artificial Sequence
  Description of Artificial Sequence: Synthetic oligonucleotide
ccaagtcgctactttcaag

SEQ ID NO: 290 - DNA, 25 bp, Homo sapiens
gaagagcagcctcagtgggaataca

SEQ ID NO: 291 - DNA, 25 bp, Artificial Sequence
  Description of Artificial Sequence: Synthetic oligonucleotide
gaggaacaaccacaatgggagtata

SEQ ID NO: 292 - DNA, 29 bp, Homo sapiens
gagcagcctcagtgggaatacaacctcta

SEQ ID NO: 293 - DNA, 29 bp, Artificial Sequence
  Description of Artificial Sequence: Synthetic oligonucleotide
gaacaaccacaatgggagtataatctgta

SEQ ID NO: 294 - DNA, 29 bp, Homo sapiens
gcagcctcagtgggaatacaacctctaca

SEQ ID NO: 295 - DNA, 29 bp, Artificial Sequence
  Description of Artificial Sequence: Synthetic oligonucleotide
acaaccacaatgggagtataatctgtata

SEQ ID NO: 296 - DNA, 21 bp, Homo sapiens
gcagcctcagtgggaatacaa

SEQ ID NO: 297 - DNA, 21 bp, Artificial Sequence
  Description of Artificial Sequence: Synthetic oligonucleotide
acaaccacaatgggagtataa

SEQ ID NO: 298 - DNA, 29 bp, Homo sapiens
gcctcagtgggaatacaacctctacatgt

SEQ ID NO: 299 - DNA, 29 bp, Artificial Sequence
  Description of Artificial Sequence: Synthetic oligonucleotide
accacaatgggagtataatctgtatatgt

SEQ ID NO: 300 - DNA, 21 bp, Homo sapiens
gtgggaatacaacctctacat

SEQ ID NO: 301 - DNA, 21 bp, Artificial Sequence
  Description of Artificial Sequence: Synthetic oligonucleotide
atgggagtataatctgtatat

SEQ ID NO: 302 - DNA, 21 bp, Homo sapiens
gggaatacaacctctacatgt

SEQ ID NO: 303 - DNA, 21 bp, Artificial Sequence
  Description of Artificial Sequence: Synthetic oligonucleotide
gggagtataatctgtatatgt

SEQ ID NO: 304 - DNA, 19 bp, Homo sapiens
gggaatacaacctctacat

SEQ ID NO: 305 - DNA, 19 bp, Artificial Sequence
  Description of Artificial Sequence: Synthetic oligonucleotide
gggagtataatctgtatat

SEQ ID NO: 306 - DNA, 21 bp, Homo sapiens
aagtactacaatgccatgaag

SEQ ID NO: 307 - DNA, 21 bp, Artificial Sequence
  Description of Artificial Sequence: Synthetic oligonucleotide
aaatattataacgcgatgaaa

SEQ ID NO: 308 - DNA, 29 bp, Homo sapiens
gtaccagggcttcatattcgacattgtga

SEQ ID NO: 309 - DNA, 29 bp, Artificial Sequence
  Description of Artificial Sequence: Synthetic oligonucleotide
atatcaagggtttatttttgatatagtca

SEQ ID NO: 310 - DNA, 21 bp, Homo sapiens
gggcttcatattcgacattgt

SEQ ID NO: 311 - DNA, 21 bp, Artificial Sequence
  Description of Artificial Sequence: Synthetic oligonucleotide
agggtttatttttgatatagt

SEQ ID NO: 312 - DNA, 25 bp, Homo sapiens
ggcttcatattcgacattgtgacca

SEQ ID NO: 313 - DNA, 25 bp, Artificial Sequence
  Description of Artificial Sequence: Synthetic oligonucleotide
gggtttatttttgatatagtcacga

SEQ ID NO: 314 - DNA, 21 bp, Homo sapiens
gcttcatattcgacattgtga

SEQ ID NO: 315 - DNA, 21 bp, Artificial Sequence
  Description of Artificial Sequence: Synthetic oligonucleotide
ggtttatttttgatatagtca

SEQ ID NO: 316 - DNA, 19 bp, Homo sapiens
gcttcatattcgacattgt

SEQ ID NO: 317 - DNA, 19 bp, Artificial Sequence
  Description of Artificial Sequence: Synthetic oligonucleotide
ggtttatttttgatatagt

SEQ ID NO: 318 - DNA, 29 bp, Homo sapiens
gctgctgctcttcctcgtcatgttcatct

SEQ ID NO: 319 - DNA, 29 bp, Artificial Sequence
  Description of Artificial Sequence: Synthetic oligonucleotide
cctcctcctgtttctggtgatgtttattt

SEQ ID NO: 320 - DNA, 29 bp, Homo sapiens
gctgctcttcctcgtcatgttcatctact

SEQ ID NO: 321 - DNA, 29 bp, Artificial Sequence
  Description of Artificial Sequence: Synthetic oligonucleotide
cctcctgtttctggtgatgtttatttatt

SEQ ID NO: 322 - DNA, 21 bp, Homo sapiens
gctgctcttcctcgtcatgtt

SEQ ID NO: 323 - DNA, 21 bp, Artificial Sequence
  Description of Artificial Sequence: Synthetic oligonucleotide
cctcctgtttctggtgatgtt

SEQ ID NO: 324 - DNA, 21 bp, Homo sapiens
gctcttcctcgtcatgttcat

SEQ ID NO: 325 - DNA, 21 bp, Artificial Sequence
  Description of Artificial Sequence: Synthetic oligonucleotide
cctgtttctggtgatgtttat

SEQ ID NO: 326 - DNA, 29 bp, Homo sapiens
gaggctggcatcgacgacatgttcaactt

SEQ ID NO: 327 - DNA, 29 bp, Artificial Sequence
  Description of Artificial Sequence: Synthetic oligonucleotide
gaagcagggattgatgatatgtttaattt

SEQ ID NO: 328 - DNA, 25 bp, Homo sapiens
gctggcatcgacgacatgttcaact

SEQ ID NO: 329 - DNA, 25 bp, Artificial Sequence
  Description of Artificial Sequence: Synthetic oligonucleotide
gcagggattgatgatatgtttaatt

SEQ ID NO: 330 - DNA, 19 bp, Homo sapiens
ggcatcgacgacatgttca

SEQ ID NO: 331 - DNA, 19 bp, Artificial Sequence
  Description of Artificial Sequence: Synthetic oligonucleotide
gggattgatgatatgttta

SEQ ID NO: 332 - DNA, 21 bp, Homo sapiens
gcatcgacgacatgttcaact

SEQ ID NO: 333 - DNA, 21 bp, Artificial Sequence
  Description of Artificial Sequence: Synthetic oligonucleotide
ggattgatgatatgtttaatt

SEQ ID NO: 334 - DNA, 19 bp, Homo sapiens
gcatcgacgacatgttcaa

SEQ ID NO: 335 - DNA, 19 bp, Artificial Sequence
  Description of Artificial Sequence: Synthetic oligonucleotide
ggattgatgatatgtttaa

SEQ ID NO: 336 - DNA, 25 bp, Homo sapiens
gacgacatgttcaacttccagacct

SEQ ID NO: 337 - DNA, 25 bp, Artificial Sequence
  Description of Artificial Sequence: Synthetic oligonucleotide
gatgatatgtttaattttcaaacgt

SEQ ID NO: 338 - DNA, 29 bp, Homo sapiens
gggcatcctcttcttcaccacctacatca

SEQ ID NO: 339 - DNA, 29 bp, Artificial Sequence
  Description of Artificial Sequence: Synthetic oligonucleotide
cgggattctgttttttacgacgtatatta

SEQ ID NO: 340 - DNA, 29 bp, Homo sapiens
ggcatcctcttcttcaccacctacatcat

SEQ ID NO: 341 - DNA, 29 bp, Artificial Sequence
  Description of Artificial Sequence: Synthetic oligonucleotide
gggattctgttttttacgacgtatattat

SEQ ID NO: 342 - DNA, 25 bp, Homo sapiens
ggcatcctcttcttcaccacctaca

SEQ ID NO: 343 - DNA, 25 bp, Artificial Sequence
  Description of Artificial Sequence: Synthetic oligonucleotide
gggattctgttttttacgacgtata

SEQ ID NO: 344 - DNA, 25 bp, Homo sapiens
gcatcctcttcttcaccacctacat

SEQ ID NO: 345 - DNA, 25 bp, Artificial Sequence
  Description of Artificial Sequence: Synthetic oligonucleotide
ggattctgttttttacgacgtatat

SEQ ID NO: 346 - DNA, 25 bp, Homo sapiens
ggtctgactacagccacagtgaaga

SEQ ID NO: 347 - DNA, 25 bp, Artificial Sequence
  Description of Artificial Sequence: Synthetic oligonucleotide
gctcagattatagtcatagcgagga

SEQ ID NO: 348 - DNA, 21 bp, Homo sapiens
gtctgactacagccacagtga

SEQ ID NO: 349 - DNA, 21 bp, Artificial Sequence
  Description of Artificial Sequence: Synthetic oligonucleotide
ctcagattatagtcatagcga

SEQ ID NO: 350 - DNA, 19 bp, Homo sapiens
gacctcaagaaggatgtct

SEQ ID NO: 351 - DNA, 19 bp, Artificial Sequence
  Description of Artificial Sequence: Synthetic oligonucleotide
gatctgaaaaaagacgtgt

SEQ ID NO: 352 - DNA, 21 bp, Homo sapiens
gtgtcaccgtcaacccttaca

SEQ ID NO: 353 - DNA, 21 bp, Artificial Sequence
  Description of Artificial Sequence: Synthetic oligonucleotide
gcgtgacggtgaatccatata

SEQ ID NO: 354 - DNA, 19 bp, Homo sapiens
gtcaccgtcaacccttaca

SEQ ID NO: 355 - DNA, 19 bp, Artificial Sequence
  Description of Artificial Sequence: Synthetic oligonucleotide
gtgacggtgaatccatata

SEQ ID NO: 356 - DNA, 29 bp, Homo sapiens
gtcaacaccaagagggtcatccagtactt

SEQ ID NO: 357 - DNA, 29 bp, Artificial Sequence
  Description of Artificial Sequence: Synthetic oligonucleotide
gtgaatacgaaaagagtgattcaatattt

SEQ ID NO: 358 - DNA, 19 bp, Homo sapiens
gagggtcatccagtacttt

SEQ ID NO: 359 - DNA, 19 bp, Artificial Sequence
  Description of Artificial Sequence: Synthetic oligonucleotide
aagagtgattcaatatttc

SEQ ID NO: 360 - DNA, 21 bp, Homo sapiens
ggagctcatggccactgataa

SEQ ID NO: 361 - DNA, 21 bp, Artificial Sequence
  Description of Artificial Sequence: Synthetic oligonucleotide
agaactgatggcgacagacaa

SEQ ID NO: 362 - DNA, 19 bp, Homo sapiens
gagctcatggccactgata

SEQ ID NO: 363 - DNA, 19 bp, Artificial Sequence
  Description of Artificial Sequence: Synthetic oligonucleotide
gaactgatggcgacagaca

SEQ ID NO: 364 - DNA, 21 bp, Homo sapiens
gggcttcacttcagaggagaa

SEQ ID NO: 365 - DNA, 21 bp, Artificial Sequence
  Description of Artificial Sequence: Synthetic oligonucleotide
cgggtttacatctgaagaaaa

SEQ ID NO: 366 - DNA, 21 bp, Homo sapiens
ggcttcacttcagaggagaaa

SEQ ID NO: 367 - DNA, 21 bp, Artificial Sequence
  Description of Artificial Sequence: Synthetic oligonucleotide
gggtttacatctgaagaaaag

SEQ ID NO: 368 - DNA, 19 bp, Homo sapiens
ggcttcacttcagaggaga

SEQ ID NO: 369 - DNA, 19 bp, Artificial Sequence
  Description of Artificial Sequence: Synthetic oligonucleotide
gggtttacatctgaagaaa

SEQ ID NO: 370 - DNA, 19 bp, Homo sapiens
gcttcacttcagaggagaa

SEQ ID NO: 371 - DNA, 19 bp, Artificial Sequence
  Description of Artificial Sequence: Synthetic oligonucleotide
ggtttacatctgaagaaaa

SEQ ID NO: 372 - DNA, 25 bp, Homo sapiens
gggcagaatgtccagcaggtgatat

SEQ ID NO: 373 - DNA, 25 bp, Artificial Sequence
  Description of Artificial Sequence: Synthetic oligonucleotide
ggccaaaacgtgcaacaagtcattt

SEQ ID NO: 374 - DNA, 25 bp, Homo sapiens
ggcagaatgtccagcaggtgatata

SEQ ID NO: 375 - DNA, 25 bp, Artificial Sequence
  Description of Artificial Sequence: Synthetic oligonucleotide
gccaaaacgtgcaacaagtcattta

SEQ ID NO: 376 - DNA, 21 bp, Homo sapiens
gcagaatgtccagcaggtgat

SEQ ID NO: 377 - DNA, 21 bp, Artificial Sequence
  Description of Artificial Sequence: Synthetic oligonucleotide
ccaaaacgtgcaacaagtcat

SEQ ID NO: 378 - DNA, 21 bp, Homo sapiens
gaatgtccagcaggtgatata

SEQ ID NO: 379 - DNA, 21 bp, Artificial Sequence
  Description of Artificial Sequence: Synthetic oligonucleotide
aaacgtgcaacaagtcattta

SEQ ID NO: 380 - DNA, 19 bp, Homo sapiens
gaatgtccagcaggtgata

SEQ ID NO: 381 - DNA, 19 bp, Artificial Sequence
  Description of Artificial Sequence: Synthetic oligonucleotide
aaacgtgcaacaagtcatt

SEQ ID NO: 382 - DNA, 29 bp, Homo sapiens
ggccaaggcagtgtatgagaggatgttca

SEQ ID NO: 383 - DNA, 29 bp, Artificial Sequence
  Description of Artificial Sequence: Synthetic oligonucleotide
cgcgaaagctgtctacgaaagaatgttta

SEQ ID NO: 384 - DNA, 21 bp, Homo sapiens
ggctgatgcgcctattgagaa

SEQ ID NO: 385 - DNA, 21 bp, Artificial Sequence
  Description of Artificial Sequence: Synthetic oligonucleotide
cgcagacgccccaatagaaaa

SEQ ID NO: 386 - DNA, 19 bp, Homo sapiens
gctgatgcgcctattgaga

SEQ ID NO: 387 - DNA, 19 bp, Artificial Sequence
  Description of Artificial Sequence: Synthetic oligonucleotide
gcagacgccccaatagaaa

SEQ ID NO: 388 - DNA, 25 bp, Homo sapiens
gaagggcaaaggcaaggccaagaaa

SEQ ID NO: 389 - DNA, 25 bp, Artificial Sequence
  Description of Artificial Sequence: Synthetic oligonucleotide
aaaagggaaggggaaagcgaaaaag

SEQ ID NO: 390 - DNA, 21 bp, Homo sapiens
ggcaaaggcaaggccaagaaa

SEQ ID NO: 391 - DNA, 21 bp, Artificial Sequence
  Description of Artificial Sequence: Synthetic oligonucleotide
gggaaggggaaagcgaaaaag

SEQ ID NO: 392 - DNA, 19 bp, Homo sapiens
gagactccctgctggtaat

SEQ ID NO: 393 - DNA, 19 bp, Artificial Sequence
  Description of Artificial Sequence: Synthetic oligonucleotide
gggattcgctcctcgttat

SEQ ID NO: 394 - DNA, 29 bp, Homo sapiens
gtcaagaattggccctggatgaagctcta

SEQ ID NO: 395 - DNA, 29 bp, Artificial Sequence
  Description of Artificial Sequence: Synthetic oligonucleotide
gtgaaaaactggccgtggatgaaactgta

SEQ ID NO: 396 - DNA, 25 bp, Homo sapiens
ggagagcatcatggacctggagaat

SEQ ID NO: 397 - DNA, 25 bp, Artificial Sequence
  Description of Artificial Sequence: Synthetic oligonucleotide
agaaagtattatggatctcgaaaac

SEQ ID NO: 398 - DNA, 21 bp, Homo sapiens
gtccgtgcagatcgagatgaa

SEQ ID NO: 399 - DNA, 21 bp, Artificial Sequence
  Description of Artificial Sequence: Synthetic oligonucleotide
ctcggtccaaattgaaatgaa

SEQ ID NO: 400 - DNA, 19 bp, Homo sapiens
gtgcagatcgagatgaaca

SEQ ID NO: 401 - DNA, 19 bp, Artificial Sequence
  Description of Artificial Sequence: Synthetic oligonucleotide
gtccaaattgaaatgaata

SEQ ID NO: 402 - DNA, 21 bp, Homo sapiens
gcagatcgagatgaacaagaa

SEQ ID NO: 403 - DNA, 21 bp, Artificial Sequence
  Description of Artificial Sequence: Synthetic oligonucleotide
ccaaattgaaatgaataaaaa

SEQ ID NO: 404 - DNA, 29 bp, Homo sapiens
gagcagatcatcaaggccaaggctaacct

SEQ ID NO: 405 - DNA, 29 bp, Artificial Sequence
  Description of Artificial Sequence: Synthetic oligonucleotide
gaacaaattattaaagcgaaagcaaatct

SEQ ID NO: 406 - DNA, 25 bp, Homo sapiens
gccaaggctaacctggagaagatgt

SEQ ID NO: 407 - DNA, 25 bp, Artificial Sequence
  Description of Artificial Sequence: Synthetic oligonucleotide
gcgaaagcaaatctcgaaaaaatgt

SEQ ID NO: 408 - DNA, 19 bp, Homo sapiens
gctaacctggagaagatgt

SEQ ID NO: 409 - DNA, 19 bp, Artificial Sequence
  Description of Artificial Sequence: Synthetic oligonucleotide
gcaaatctcgaaaaaatgt

SEQ ID NO: 410 - DNA, 25 bp, Homo sapiens
gtggaggctgttaatgccaagtgct

SEQ ID NO: 411 - DNA, 25 bp, Artificial Sequence
  Description of Artificial Sequence: Synthetic oligonucleotide
gtcgaagcagtaaacgcgaaatgtt

SEQ ID NO: 412 - DNA, 19 bp, Homo sapiens
gctgttaatgccaagtgct

SEQ ID NO: 413 - DNA, 19 bp, Artificial Sequence
  Description of Artificial Sequence: Synthetic oligonucleotide
gcagtaaacgcgaaatgtt

SEQ ID NO: 414 - DNA, 19 bp, Homo sapiens
gcccagaagcaagtcaaga

SEQ ID NO: 415 - DNA, 19 bp, Artificial Sequence
  Description of Artificial Sequence: Synthetic oligonucleotide
gcgcaaaaacaggtgaaaa

SEQ ID NO: 416 - DNA, 21 bp, Homo sapiens
aagagcctccagagcttgttg

SEQ ID NO: 417 - DNA, 21 bp, Artificial Sequence
  Description of Artificial Sequence: Synthetic oligonucleotide
aaaagtctgcaaagtttatta

SEQ ID NO: 418 - DNA, 19 bp, Homo sapiens
gcatcaaggagctcaccta

SEQ ID NO: 419 - DNA, 19 bp, Artificial Sequence
  Description of Artificial Sequence: Synthetic oligonucleotide
ggattaaagaactgacgta

SEQ ID NO: 420 - DNA, 21 bp, Homo sapiens
gctaaaggtcaaggcctacaa

SEQ ID NO: 421 - DNA, 21 bp, Artificial Sequence
  Description of Artificial Sequence: Synthetic oligonucleotide
acttaaagtgaaagcgtataa

SEQ ID NO: 422 - DNA, 21 bp, Homo sapiens
ggagatggaatacaactgact

SEQ ID NO: 423 - DNA, 21 bp, Artificial Sequence
  Description of Artificial Sequence: Synthetic oligonucleotide
ggtgacggtattcagctcaca

SEQ ID NO: 424 - DNA, 25 bp, Homo sapiens
ggaaatcctcgacagcttgatcaga

SEQ ID NO: 425 - DNA, 25 bp, Artificial Sequence
  Description of Artificial Sequence: Synthetic oligonucleotide
ggagattctggatagtttaattagg

SEQ ID NO: 426 - DNA, 29 bp, Homo sapiens
gaaatcctcgacagcttgatcagagagat

SEQ ID NO: 427 - DNA, 29 bp, Artificial Sequence
  Description of Artificial Sequence: Synthetic oligonucleotide
gagattctggatagtttaattagggaaat

SEQ ID NO: 428 - DNA, 21 bp, Homo sapiens
gcaaatgcgagccctttataa

SEQ ID NO: 429 - DNA, 21 bp, Artificial Sequence
  Description of Artificial Sequence: Synthetic oligonucleotide
acagatgcgtgcgctatacaa

SEQ ID NO: 430 - DNA, 21 bp, Homo sapiens
ggatgagttcaccaaacatgt

SEQ ID NO: 431 - DNA, 21 bp, Artificial Sequence
  Description of Artificial Sequence: Synthetic oligonucleotide
ggacgaatttacgaagcacgt

SEQ ID NO: 432 - DNA, 19 bp, Homo sapiens
ggatgagttcaccaaacat

SEQ ID NO: 433 - DNA, 19 bp, Artificial Sequence
  Description of Artificial Sequence: Synthetic oligonucleotide
ggacgaatttacgaagcac

SEQ ID NO: 434 - DNA, 29 bp, Homo sapiens
gtcctcaatcagcatccagcttcagacaa

SEQ ID NO: 435 - DNA, 29 bp, Artificial Sequence
  Description of Artificial Sequence: Synthetic oligonucleotide
gtgctgaaccaacaccctgcatctgataa

SEQ ID NO: 436 - DNA, 19 bp, Homo sapiens
gcatccagcttcagacaaa

SEQ ID NO: 437 - DNA, 19 bp, Artificial Sequence
  Description of Artificial Sequence: Synthetic oligonucleotide
acaccctgcatctgataag

SEQ ID NO: 438 - DNA, 29 bp, Homo sapiens
gcagacgcagtggagttggattcttcaga

SEQ ID NO: 439 - DNA, 29 bp, Artificial Sequence
  Description of Artificial Sequence: Synthetic oligonucleotide
ccaaacccaatggagctggatactacaaa

SEQ ID NO: 440 - DNA, 19 bp, Homo sapiens
gcagtggagttggattctt

SEQ ID NO: 441 - DNA, 19 bp, Artificial Sequence
  Description of Artificial Sequence: Synthetic oligonucleotide
ccaatggagctggatacta

SEQ ID NO: 442 - DNA, 25 bp, Homo sapiens
ggaacagatcaaggagctggagaaa

SEQ ID NO: 443 - DNA, 25 bp, Artificial Sequence
  Description of Artificial Sequence: Synthetic oligonucleotide
cgagcaaattaaagaactcgaaaag

SEQ ID NO: 444 - DNA, 21 bp, Homo sapiens
ggtgcagaacttggtaaacaa

SEQ ID NO: 445 - DNA, 21 bp, Artificial Sequence
  Description of Artificial Sequence: Synthetic oligonucleotide
agtccaaaatttagttaataa

SEQ ID NO: 446 - DNA, 19 bp, Homo sapiens
gtgcagaacttggtaaaca

SEQ ID NO: 447 - DNA, 19 bp, Artificial Sequence
  Description of Artificial Sequence: Synthetic oligonucleotide
gtccaaaatttagttaata

SEQ ID NO: 448 - DNA, 19 bp, Homo sapiens
gagctctctgtgactacaa

SEQ ID NO: 449 - DNA, 19 bp, Artificial Sequence
  Description of Artificial Sequence: Synthetic oligonucleotide
gggcactgtgcgattataa

SEQ ID NO: 450 - DNA, 29 bp, Homo sapiens
ggctctgtggaaccagctctacatcaaca

SEQ ID NO: 451 - DNA, 29 bp, Artificial Sequence
  Description of Artificial Sequence: Synthetic oligonucleotide
agcactctggaatcaactgtatattaata

SEQ ID NO: 452 - DNA, 29 bp, Artificial Sequence
  Description of Artificial Sequence: Synthetic oligonucleotide
gcattattgtatgatagatattgaaaaaa

SEQ ID NO: 453 - DNA, 21 bp, Homo sapiens
gcatgattgacatagagaaga

SEQ ID NO: 454 - DNA, 21 bp, Artificial Sequence
  Description of Artificial Sequence: Synthetic oligonucleotide
gtatgatagatattgaaaaaa

SEQ ID NO: 455 - DNA, 19 bp, Homo sapiens
gcatgattgacatagagaa

SEQ ID NO: 456 - DNA, 19 bp, Artificial Sequence
  Description of Artificial Sequence: Synthetic oligonucleotide
gtatgatagatattgaaaa

SEQ ID NO: 457 - DNA, 29 bp, Homo sapiens
ggaacctgccaagatgtcaaccataataa

SEQ ID NO: 458 - DNA, 29 bp, Artificial Sequence
  Description of Artificial Sequence: Synthetic oligonucleotide
ggtacgtgtcaggacgtgaatcacaacaa

SEQ ID NO: 459 - DNA, 29 bp, Homo sapiens
gaccagggatcttctcaccacatcacagt

SEQ ID NO: 460 - DNA, 29 bp, Artificial Sequence
  Description of Artificial Sequence: Synthetic oligonucleotide
gatcaaggttcatcacatcatattactgt

SEQ ID NO: 461 - DNA, 25 bp, Homo sapiens
gaccagggatcttctcaccacatca

SEQ ID NO: 462 - DNA, 25 bp, Artificial Sequence
  Description of Artificial Sequence: Synthetic oligonucleotide
gatcaaggttcatcacatcatatta

SEQ ID NO: 463 - DNA, 21 bp, Homo sapiens
gcttaagagtgtgcagaatga

SEQ ID NO: 464 - DNA, 21 bp, Artificial Sequence
  Description of Artificial Sequence: Synthetic oligonucleotide
actaaaaagcgtccaaaacga

SEQ ID NO: 465 - DNA, 19 bp, Homo sapiens
gcctggacctggataaagt

SEQ ID NO: 466 - DNA, 19 bp, Artificial Sequence
  Description of Artificial Sequence: Synthetic oligonucleotide
gtctcgatctcgacaaggt

SEQ ID NO: 467 - DNA, 21 bp, Homo sapiens
gttggccactatgaagacaga

SEQ ID NO: 468 - DNA, 21 bp, Artificial Sequence
  Description of Artificial Sequence: Synthetic oligonucleotide
attagcgacaatgaaaactga

SEQ ID NO: 469 - DNA, 19 bp, Homo sapiens
gttggccactatgaagaca

SEQ ID NO: 470 - DNA, 19 bp, Artificial Sequence
  Description of Artificial Sequence: Synthetic oligonucleotide
attagcgacaatgaaaact

SEQ ID NO: 471 - DNA, 21 bp, Homo sapiens
ggccactatgaagacagaact

SEQ ID NO: 472 - DNA, 21 bp, Artificial Sequence
  Description of Artificial Sequence: Synthetic oligonucleotide
agcgacaatgaaaactgagct

SEQ ID NO: 473 - DNA, 19 bp, Homo sapiens
ggccactatgaagacagaa

SEQ ID NO: 474 - DNA, 19 bp, Artificial Sequence
  Description of Artificial Sequence: Synthetic oligonucleotide
agcgacaatgaaaactgag

SEQ ID NO: 475 - DNA, 21 bp, Homo sapiens
gccactatgaagacagaacta

SEQ ID NO: 476 - DNA, 21 bp, Artificial Sequence
  Description of Artificial Sequence: Synthetic oligonucleotide
gcgacaatgaaaactgagctt

SEQ ID NO: 477 - DNA, 19 bp, Homo sapiens
gcagatccactctcagact

SEQ ID NO: 478 - DNA, 19 bp, Artificial Sequence
  Description of Artificial Sequence: Synthetic oligonucleotide
acaaattcattcacaaaca

SEQ ID NO: 479 - DNA, 25 bp, Homo sapiens
ggctttctgcaagtggctctatgat

SEQ ID NO: 480 - DNA, 25 bp, Artificial Sequence
  Description of Artificial Sequence: Synthetic oligonucleotide
agcattttgtaaatggctgtacgac

SEQ ID NO: 481 - DNA, 21 bp, Homo sapiens
gctttctgcaagtggctctat

SEQ ID NO: 482 - DNA, 21 bp, Artificial Sequence
  Description of Artificial Sequence: Synthetic oligonucleotide
gcattttgtaaatggctgtac

SEQ ID NO: 483 - DNA, 19 bp, Homo sapiens
gtggctctatgatgctaaa

SEQ ID NO: 484 - DNA, 19 bp, Artificial Sequence
  Description of Artificial Sequence: Synthetic oligonucleotide
atggctgtacgacgcaaag

SEQ ID NO: 485 - DNA, 21 bp, Homo sapiens
gctcggtacattgaactactt

SEQ ID NO: 486 - DNA, 21 bp, Artificial Sequence
  Description of Artificial Sequence: Synthetic oligonucleotide
gcacgctatatagagcttcta

SEQ ID NO: 487 - DNA, 29 bp, Homo sapiens
gaactacttacaagatctggagactatta

SEQ ID NO: 488 - DNA, 29 bp, Artificial Sequence
  Description of Artificial Sequence: Synthetic oligonucleotide
gagcttctaactaggtcaggtgattacta

SEQ ID NO: 489 - DNA, 25 bp, Homo sapiens
gaactacttacaagatctggagact

SEQ ID NO: 490 - DNA, 25 bp, Artificial Sequence
  Description of Artificial Sequence: Synthetic oligonucleotide
gagcttctaactaggtcaggtgatt

SEQ ID NO: 491 - DNA, 21 bp, Homo sapiens
ggcagagtgttcccagttcaa

SEQ ID NO: 492 - DNA, 21 bp, Artificial Sequence
  Description of Artificial Sequence: Synthetic oligonucleotide
agctgaatgctcgcaatttaa

SEQ ID NO: 493 - DNA, 21 bp, Homo sapiens
gcagagtgttcccagttcaaa

SEQ ID NO: 494 - DNA, 21 bp, Artificial Sequence
  Description of Artificial Sequence: Synthetic oligonucleotide
gctgaatgctcgcaatttaag

SEQ ID NO: 495 - DNA, 19 bp, Homo sapiens
gcagagtgttcccagttca

SEQ ID NO: 496 - DNA, 19 bp, Artificial Sequence
  Description of Artificial Sequence: Synthetic oligonucleotide
gctgaatgctcgcaattta

SEQ ID NO: 497 - DNA, 21 bp, Homo sapiens
ggcaaaggtaagaaaccacta

SEQ ID NO: 498 - DNA, 21 bp, Artificial Sequence
  Description of Artificial Sequence: Synthetic oligonucleotide
cgctaaagttaggaatcatta

SEQ ID NO: 499 - DNA, 21 bp, Homo sapiens
gcaaaggtaagaaaccactat

SEQ ID NO: 500 - DNA, 21 bp, Artificial Sequence
  Description of Artificial Sequence: Synthetic oligonucleotide
gctaaagttaggaatcattac

SEQ ID NO: 501 - DNA, 19 bp, Homo sapiens
gaccaccatcaaggagata

SEQ ID NO: 502 - DNA, 19 bp, Artificial Sequence
  Description of Artificial Sequence: Synthetic oligonucleotide
aacgacgattaaagaaatt

SEQ ID NO: 503 - DNA, 19 bp, Homo sapiens
gaaggaagaggataccagt

SEQ ID NO: 504 - DNA, 19 bp, Artificial Sequence
  Description of Artificial Sequence: Synthetic oligonucleotide
aaaagaggaagacacgagc

SEQ ID NO: 505 - DNA, 19 bp, Homo sapiens
ggagcttatctgaagaaat

SEQ ID NO: 506 - DNA, 19 bp, Artificial Sequence
  Description of Artificial Sequence: Synthetic oligonucleotide
gaagtttgtcagaggagat

SEQ ID NO: 507 - DNA, 19 bp, Homo sapiens
gagcttatctgaagaaata

SEQ ID NO: 508 - DNA, 19 bp, Artificial Sequence
  Description of Artificial Sequence: Synthetic oligonucleotide
aagtttgtcagaggagatt

SEQ ID NO: 509 - DNA, 21 bp, Homo sapiens
gatcgacaaagaaacaaatga

SEQ ID NO: 510 - DNA, 21 bp, Artificial Sequence
  Description of Artificial Sequence: Synthetic oligonucleotide
cattgataaggagactaacga

SEQ ID NO: 511 - DNA, 19 bp, Homo sapiens
gatcgacaaagaaacaaat

SEQ ID NO: 512 - DNA, 19 bp, Artificial Sequence
  Description of Artificial Sequence: Synthetic oligonucleotide
cattgataaggagactaac

SEQ ID NO: 513 - DNA, 19 bp, Homo sapiens
gcagaaagcaaacagtagt

SEQ ID NO: 514 - DNA, 19 bp, Artificial Sequence
  Description of Artificial Sequence: Synthetic oligonucleotide
ccaaaaggctaatagcagc

SEQ ID NO: 515 - DNA, 29 bp, Homo sapiens
ggagaggactgtgaaggaccaggatatca

SEQ ID NO: 516 - DNA, 29 bp, Artificial Sequence
  Description of Artificial Sequence: Synthetic oligonucleotide
agaaagaacagtcaaagatcaagacatta

SEQ ID NO: 517 - DNA, 21 bp, Homo sapiens
gactgtgaaggaccaggatat

SEQ ID NO: 518 - DNA, 21 bp, Artificial Sequence
  Description of Artificial Sequence: Synthetic oligonucleotide
aacagtcaaagatcaagacat

SEQ ID NO: 519 - DNA, 19 bp, Homo sapiens
gtgaaggaccaggatatca

SEQ ID NO: 520 - DNA, 19 bp, Artificial Sequence
  Description of Artificial Sequence: Synthetic oligonucleotide
gtcaaagatcaagacatta

SEQ ID NO: 521 - DNA, 21 bp, Homo sapiens
gaagcagaaggtggaagagga

SEQ ID NO: 522 - DNA, 21 bp, Artificial Sequence
  Description of Artificial Sequence: Synthetic oligonucleotide
aaaacaaaaagtcgaggaaga

SEQ ID NO: 523 - DNA, 19 bp, Homo sapiens
ggagcaggcatccattgtt

SEQ ID NO: 524 - DNA, 19 bp, Artificial Sequence
  Description of Artificial Sequence: Synthetic oligonucleotide
cgaacaagcttcgatagta

SEQ ID NO: 525 - DNA, 19 bp, Homo sapiens
ggaacaggaaagtgtcaaa

SEQ ID NO: 526 - DNA, 19 bp, Artificial Sequence
  Description of Artificial Sequence: Synthetic oligonucleotide
agagcaagagagcgtgaag

SEQ ID NO: 527 - DNA, 21 bp, Homo sapiens
gaaattgagaggctgcagtct

SEQ ID NO: 528 - DNA, 21 bp, Artificial Sequence
  Description of Artificial Sequence: Synthetic oligonucleotide
gagatagaaagactccaatca

SEQ ID NO: 529 - DNA, 21 bp, Homo sapiens
gaacctgaccaaggagcactt

SEQ ID NO: 530 - DNA, 21 bp, Artificial Sequence
  Description of Artificial Sequence: Synthetic oligonucleotide
aaatctcacgaaagaacattt

SEQ ID NO: 531 - DNA, 19 bp, Homo sapiens
ggagcacttgatgttagaa

SEQ ID NO: 532 - DNA, 19 bp, Artificial Sequence
  Description of Artificial Sequence: Synthetic oligonucleotide
agaacatttaatgttggag

SEQ ID NO: 533 - DNA, 21 bp, Homo sapiens
gagcacttgatgttagaagaa

SEQ ID NO: 534 - DNA, 21 bp, Artificial Sequence
  Description of Artificial Sequence: Synthetic oligonucleotide
gaacatttaatgttggaggag

SEQ ID NO: 535 - DNA, 19 bp, Homo sapiens
gcacttgatgttagaagaa

SEQ ID NO: 536 - DNA, 19 bp, Artificial Sequence
  Description of Artificial Sequence: Synthetic oligonucleotide
acatttaatgttggaggag

SEQ ID NO: 537 - DNA, 19 bp, Homo sapiens
gcaaccatcttggaactaa

SEQ ID NO: 538 - DNA, 19 bp, Artificial Sequence
  Description of Artificial Sequence: Synthetic oligonucleotide
gctacgattttagagctta

SEQ ID NO: 539 - DNA, 21 bp, Homo sapiens
gaggaggctattaggaagata

SEQ ID NO: 540 - DNA, 21 bp, Artificial Sequence
  Description of Artificial Sequence: Synthetic oligonucleotide
gaagaagcaataagaaaaatt

SEQ ID NO: 541 - DNA, 19 bp, Homo sapiens
ggaggctattaggaagata

SEQ ID NO: 542 - DNA, 19 bp, Artificial Sequence
  Description of Artificial Sequence: Synthetic oligonucleotide
agaagcaataagaaaaatt

SEQ ID NO: 543 - DNA, 19 bp, Homo sapiens
ggagtgagatcgaaagact

SEQ ID NO: 544 - DNA, 19 bp, Artificial Sequence
  Description of Artificial Sequence: Synthetic oligonucleotide
gaagcgaaattgagaggct

SEQ ID NO: 545 - DNA, 21 bp, Homo sapiens
gaggattctaccagggagaca

SEQ ID NO: 546 - DNA, 21 bp, Artificial Sequence
  Description of Artificial Sequence: Synthetic oligonucleotide
gaagactcaacgagagaaact

SEQ ID NO: 547 - DNA, 19 bp, Homo sapiens
ggattctaccagggagaca

SEQ ID NO: 548 - DNA, 19 bp, Artificial Sequence
  Description of Artificial Sequence: Synthetic oligonucleotide
agactcaacgagagaaact

SEQ ID NO: 549 - DNA, 21 bp, Homo sapiens
ggagattgataaactcagaca

SEQ ID NO: 550 - DNA, 21 bp, Artificial Sequence
  Description of Artificial Sequence: Synthetic oligonucleotide
agaaatagacaagctgaggca

SEQ ID NO: 551 - DNA, 19 bp, Homo sapiens
ggagattgataaactcaga

SEQ ID NO: 552 - DNA, 19 bp, Artificial Sequence
  Description of Artificial Sequence: Synthetic oligonucleotide
agaaatagacaagctgagg

SEQ ID NO: 553 - DNA, 19 bp, Homo sapiens
gctgaggaagaaggtgaca

SEQ ID NO: 554 - DNA, 19 bp, Artificial Sequence
  Description of Artificial Sequence: Synthetic oligonucleotide
cctcagaaaaaaagtcact

SEQ ID NO: 555 - DNA, 25 bp, Homo sapiens
gaggccaagagaaagaaattaatca

SEQ ID NO: 556 - DNA, 25 bp, Artificial Sequence
  Description of Artificial Sequence: Synthetic oligonucleotide
gaagcgaaaaggaaaaagttgatta

SEQ ID NO: 557 - DNA, 21 bp, Homo sapiens
gaggccaagagaaagaaatta

SEQ ID NO: 558 - DNA, 21 bp, Artificial Sequence
  Description of Artificial Sequence: Synthetic oligonucleotide
gaagcgaaaaggaaaaagttg

SEQ ID NO: 559 - DNA, 19 bp, Homo sapiens
gaggccaagagaaagaaat

SEQ ID NO: 560 - DNA, 19 bp, Artificial Sequence
  Description of Artificial Sequence: Synthetic oligonucleotide
gaagcgaaaaggaaaaagt

SEQ ID NO: 561 - DNA, 21 bp, Homo sapiens
ggccaagagaaagaaattaat

SEQ ID NO: 562 - DNA, 21 bp, Artificial Sequence
  Description of Artificial Sequence: Synthetic oligonucleotide
agcgaaaaggaaaaagttgat

SEQ ID NO: 563 - DNA, 19 bp, Homo sapiens
ggccaagagaaagaaatta

SEQ ID NO: 564 - DNA, 19 bp, Artificial Sequence
  Description of Artificial Sequence: Synthetic oligonucleotide
agcgaaaaggaaaaagttg

SEQ ID NO: 565 - DNA, 19 bp, Homo sapiens
gccaagagaaagaaattaa

SEQ ID NO: 566 - DNA, 19 bp, Artificial Sequence
  Description of Artificial Sequence: Synthetic oligonucleotide
gcgaaaaggaaaaagttga

SEQ ID NO: 567 - DNA, 29 bp, Homo sapiens
gaaattaatcagcccagaatccacagtca

SEQ ID NO: 568 - DNA, 29 bp, Artificial Sequence
  Description of Artificial Sequence: Synthetic oligonucleotide
aaagttgattagtcctgagtcgactgtga

SEQ ID NO: 569 - DNA, 19 bp, Homo sapiens
gcccagaatccacagtcat

SEQ ID NO: 570 - DNA, 19 bp, Artificial Sequence
  Description of Artificial Sequence: Synthetic oligonucleotide
gtcctgagtcgactgtgat

SEQ ID NO: 571 - DNA, 29 bp, Homo sapiens
ggtataattgatccccatcggaatgagaa

SEQ ID NO: 572 - DNA, 29 bp, Artificial Sequence
  Description of Artificial Sequence: Synthetic oligonucleotide
ggaattatagacccgcaccgcaacgaaaa

SEQ ID NO: 573 - DNA, 19 bp, Homo sapiens
gatccccatcggaatgaga

SEQ ID NO: 574 - DNA, 19 bp, Artificial Sequence
  Description of Artificial Sequence: Synthetic oligonucleotide
gacccgcaccgcaacgaaa

SEQ ID NO: 575 - DNA, 21 bp, Homo sapiens
aagaaggtcagttacgtgcag

SEQ ID NO: 576 - DNA, 21 bp, Artificial Sequence
  Description of Artificial Sequence: Synthetic oligonucleotide
aaaaaagtgagctatgtccaa

SEQ ID NO: 577 - DNA, 21 bp, Homo sapiens
ggtctgctcttgctttcagta

SEQ ID NO: 578 - DNA, 21 bp, Artificial Sequence
  Description of Artificial Sequence: Synthetic oligonucleotide
ggactcctgttactatctgtt

SEQ ID NO: 579 - DNA, 19 bp, Homo sapiens
gtctgctcttgctttcagt

SEQ ID NO: 580 - DNA, 19 bp, Artificial Sequence
  Description of Artificial Sequence: Synthetic oligonucleotide
gactcctgttactatctgt

SEQ ID NO: 581 - DNA, 19 bp, Homo sapiens
gctttcagtacagaagaga

SEQ ID NO: 582 - DNA, 19 bp, Artificial Sequence
  Description of Artificial Sequence: Synthetic oligonucleotide
actatctgttcaaaaaagg

SEQ ID NO: 583 - DNA, 19 bp, Homo sapiens
gcatagcaggcatatacaa

SEQ ID NO: 584 - DNA, 19 bp, Artificial Sequence
  Description of Artificial Sequence: Synthetic oligonucleotide
gtattgctgggatttataa

SEQ ID NO: 585 - DNA, 21 bp, Homo sapiens
ggcatttatgaggccatgaaa

SEQ ID NO: 586 - DNA, 21 bp, Artificial Sequence
  Description of Artificial Sequence: Synthetic oligonucleotide
gggatatacgaagcgatgaag

SEQ ID NO: 587 - DNA, 19 bp, Homo sapiens
gcaacttgaggttaccagt

SEQ ID NO: 588 - DNA, 19 bp, Artificial Sequence
  Description of Artificial Sequence: Synthetic oligonucleotide
gtaatttaagattgcctgt

SEQ ID NO: 589 - DNA, 29 bp, Homo sapiens
gcagaacgagctgtcactgggtataatga

SEQ ID NO: 590 - DNA, 29 bp, Artificial Sequence
  Description of Artificial Sequence: Synthetic oligonucleotide
gctgagcgtgcagtgacaggctacaacga

SEQ ID NO: 591 - DNA, 19 bp, Homo sapiens
gagctgtcactgggtataa

SEQ ID NO: 592 - DNA, 19 bp, Artificial Sequence
  Description of Artificial Sequence: Synthetic oligonucleotide
gtgcagtgacaggctacaa

SEQ ID NO: 593 - DNA, 21 bp, Homo sapiens
gctgtcactgggtataatgat

SEQ ID NO: 594 - DNA, 21 bp, Artificial Sequence
  Description of Artificial Sequence: Synthetic oligonucleotide
gcagtgacaggctacaacgac

SEQ ID NO: 595 - DNA, 21 bp, Homo sapiens
gggtataatgatcctgaaaca

SEQ ID NO: 596 - DNA, 21 bp, Artificial Sequence
  Description of Artificial Sequence: Synthetic oligonucleotide
ggctacaacgacccagagact

SEQ ID NO: 597 - DNA, 21 bp, Homo sapiens
gaaacaggaaacatcatctct

SEQ ID NO: 598 - DNA, 21 bp, Artificial Sequence
  Description of Artificial Sequence: Synthetic oligonucleotide
gagactggtaatattatttca

SEQ ID NO: 599 - DNA, 19 bp, Homo sapiens
gaaacaggaaacatcatct

SEQ ID NO: 600 - DNA, 19 bp, Artificial Sequence
  Description of Artificial Sequence: Synthetic oligonucleotide
gagactggtaatattattt

SEQ ID NO: 601 - DNA, 25 bp, Homo sapiens
gggccacggtattcgcttattagaa

SEQ ID NO: 602 - DNA, 25 bp, Artificial Sequence
  Description of Artificial Sequence: Synthetic oligonucleotide
agggcatggaatacggttgttggag

SEQ ID NO: 603 - DNA, 21 bp, Homo sapiens
gggccacggtattcgcttatt

SEQ ID NO: 604 - DNA, 21 bp, Artificial Sequence
  Description of Artificial Sequence: Synthetic oligonucleotide
agggcatggaatacggttgtt

SEQ ID NO: 605 - DNA, 21 bp, Homo sapiens
ggccacggtattcgcttatta

SEQ ID NO: 606 - DNA, 21 bp, Artificial Sequence
  Description of Artificial Sequence: Synthetic oligonucleotide
gggcatggaatacggttgttg

SEQ ID NO: 607 - DNA, 19 bp, Homo sapiens
gccacggtattcgcttatt

SEQ ID NO: 608 - DNA, 19 bp, Artificial Sequence
  Description of Artificial Sequence: Synthetic oligonucleotide
ggcatggaatacggttgtt

SEQ ID NO: 609 - DNA, 29 bp, Homo sapiens
gacccaaaggagagccatcgtttaccagt

SEQ ID NO: 610 - DNA, 29 bp, Artificial Sequence
  Description of Artificial Sequence: Synthetic oligonucleotide
gatcctaaagaaagtcaccgattgcctgt

SEQ ID NO: 611 - DNA, 21 bp, Homo sapiens
ggagagccatcgtttaccagt

SEQ ID NO: 612 - DNA, 21 bp, Artificial Sequence
  Description of Artificial Sequence: Synthetic oligonucleotide
agaaagtcaccgattgcctgt

SEQ ID NO: 613 - DNA, 19 bp, Homo sapiens
ggagagccatcgtttacca

SEQ ID NO: 614 - DNA, 19 bp, Artificial Sequence
  Description of Artificial Sequence: Synthetic oligonucleotide
agaaagtcaccgattgcct

SEQ ID NO: 615 - DNA, 25 bp, Homo sapiens
gagccatcgtttaccagttgacata

SEQ ID NO: 616 - DNA, 25 bp, Artificial Sequence
  Description of Artificial Sequence: Synthetic oligonucleotide
aagtcaccgattgcctgtagatatt

SEQ ID NO: 617 - DNA, 21 bp, Homo sapiens
gagccatcgtttaccagttga

SEQ ID NO: 618 - DNA, 21 bp, Artificial Sequence
  Description of Artificial Sequence: Synthetic oligonucleotide
aagtcaccgattgcctgtaga

SEQ ID NO: 619 - DNA, 19 bp, Homo sapiens
gagccatcgtttaccagtt

SEQ ID NO: 620 - DNA, 19 bp, Artificial Sequence
  Description of Artificial Sequence: Synthetic oligonucleotide
aagtcaccgattgcctgta

SEQ ID NO: 621 - DNA, 21 bp, Homo sapiens
gccatcgtttaccagttgaca

SEQ ID NO: 622 - DNA, 21 bp, Artificial Sequence
  Description of Artificial Sequence: Synthetic oligonucleotide
gtcaccgattgcctgtagata

SEQ ID NO: 623 - DNA, 19 bp, Homo sapiens
gccatcgtttaccagttga

SEQ ID NO: 624 - DNA, 19 bp, Artificial Sequence
  Description of Artificial Sequence: Synthetic oligonucleotide
gtcaccgattgcctgtaga

SEQ ID NO: 625 - DNA, 25 bp, Homo sapiens
gtttaccagttgacatagcatataa

SEQ ID NO: 626 - DNA, 25 bp, Artificial Sequence
  Description of Artificial Sequence: Synthetic oligonucleotide
gattgcctgtagatattgcttacaa

SEQ ID NO: 627 - DNA, 19 bp, Homo sapiens
gttgacatagcatataaga

SEQ ID NO: 628 - DNA, 19 bp, Artificial Sequence
  Description of Artificial Sequence: Synthetic oligonucleotide
gtagatattgcttacaaaa

SEQ ID NO: 629 - DNA, 25 bp, Homo sapiens
gattctctcagatccaagtgatgat

SEQ ID NO: 630 - DNA, 25 bp, Artificial Sequence
  Description of Artificial Sequence: Synthetic oligonucleotide
aatactgtctgaccctagcgacgac

SEQ ID NO: 631 - DNA, 21 bp, Homo sapiens
gattctctcagatccaagtga

SEQ ID NO: 632 - DNA, 21 bp, Artificial Sequence
  Description of Artificial Sequence: Synthetic oligonucleotide
aatactgtctgaccctagcga

SEQ ID NO: 633 - DNA, 19 bp, Homo sapiens
gatccaagtgatgatacca

SEQ ID NO: 634 - DNA, 19 bp, Artificial Sequence
  Description of Artificial Sequence: Synthetic oligonucleotide
gaccctagcgacgacacga

SEQ ID NO: 635 - DNA, 21 bp, Homo sapiens
gctctgtcttctgcctctgaa

SEQ ID NO: 636 - DNA, 21 bp, Artificial Sequence
  Description of Artificial Sequence: Synthetic oligonucleotide
cctgtgcctactcccactcaa

SEQ ID NO: 637 - DNA, 25 bp, Homo sapiens
ggaagcgtagagtggtcatagttga

SEQ ID NO: 638 - DNA, 25 bp, Artificial Sequence
  Description of Artificial Sequence: Synthetic oligonucleotide
gaaaacgaagggtcgtgattgtaga

SEQ ID NO: 639 - DNA, 19 bp, Homo sapiens
ggaagcgtagagtggtcat

SEQ ID NO: 640 - DNA, 19 bp, Artificial Sequence
  Description of Artificial Sequence: Synthetic oligonucleotide
gaaaacgaagggtcgtgat

SEQ ID NO: 641 - DNA, 21 bp, Homo sapiens
gaagcgtagagtggtcatagt

SEQ ID NO: 642 - DNA, 21 bp, Artificial Sequence
  Description of Artificial Sequence: Synthetic oligonucleotide
aaaacgaagggtcgtgattgt

SEQ ID NO: 643 - DNA, 19 bp, Homo sapiens
gaagcgtagagtggtcata

SEQ ID NO: 644 - DNA, 19 bp, Artificial Sequence
  Description of Artificial Sequence: Synthetic oligonucleotide
aaaacgaagggtcgtgatt

SEQ ID NO: 645 - DNA, 21 bp, Homo sapiens
gcgtagagtggtcatagttga

SEQ ID NO: 646 - DNA, 21 bp, Artificial Sequence
  Description of Artificial Sequence: Synthetic oligonucleotide
acgaagggtcgtgattgtaga

SEQ ID NO: 647 - DNA, 19 bp, Homo sapiens
gcgtagagtggtcatagtt

SEQ ID NO: 648 - DNA, 19 bp, Artificial Sequence
  Description of Artificial Sequence: Synthetic oligonucleotide
acgaagggtcgtgattgta

SEQ ID NO: 649 - DNA, 21 bp, Homo sapiens
gttgacccagaaaccaataaa

SEQ ID NO: 650 - DNA, 21 bp, Artificial Sequence
  Description of Artificial Sequence: Synthetic oligonucleotide
gtagatcctgagacgaacaag

SEQ ID NO: 651 - DNA, 25 bp, Homo sapiens
gacccagaaaccaataaagaaatgt

SEQ ID NO: 652 - DNA, 25 bp, Artificial Sequence
  Description of Artificial Sequence: Synthetic oligonucleotide
gatcctgagacgaacaaggagatgt

SEQ ID NO: 653 - DNA, 21 bp, Homo sapiens
gacccagaaaccaataaagaa

SEQ ID NO: 654 - DNA, 21 bp, Artificial Sequence
  Description of Artificial Sequence: Synthetic oligonucleotide
gatcctgagacgaacaaggag

SEQ ID NO: 655 - DNA, 21 bp, Homo sapiens
gtctgttcaggaggcctacaa

SEQ ID NO: 656 - DNA, 21 bp, Artificial Sequence
  Description of Artificial Sequence: Synthetic oligonucleotide
gtcagtacaagaagcgtataa

SEQ ID NO: 657 - DNA, 21 bp, Homo sapiens
gcctacaagaagggcctaatt

SEQ ID NO: 658 - DNA, 21 bp, Artificial Sequence
  Description of Artificial Sequence: Synthetic oligonucleotide
gcgtataaaaaagggcttata

SEQ ID NO: 659 - DNA, 25 bp, Homo sapiens
gcaggaatgtgaatgggaagaaata

SEQ ID NO: 660 - DNA, 25 bp, Artificial Sequence
  Description of Artificial Sequence: Synthetic oligonucleotide
acaagagtgcgagtgggaggagatt

SEQ ID NO: 661 - DNA, 21 bp, Homo sapiens
ggaatgtgaatgggaagaaat

SEQ ID NO: 662 - DNA, 21 bp, Artificial Sequence
  Description of Artificial Sequence: Synthetic oligonucleotide
agagtgcgagtgggaggagat

SEQ ID NO: 663 - DNA, 21 bp, Homo sapiens
gaatgtgaatgggaagaaata

SEQ ID NO: 664 - DNA, 21 bp, Artificial Sequence
  Description of Artificial Sequence: Synthetic oligonucleotide
gagtgcgagtgggaggagatt

SEQ ID NO: 665 - DNA, 29 bp, Homo sapiens
gggaagaaataaccatcacgggatcagat

SEQ ID NO: 666 - DNA, 29 bp, Artificial Sequence
  Description of Artificial Sequence: Synthetic oligonucleotide
gggaggagattacgattaccggttctgac

SEQ ID NO: 667 - DNA, 29 bp, Homo sapiens
gcagtcagtatgatattcaagatgctatt

SEQ ID NO: 668 - DNA, 29 bp, Artificial Sequence
  Description of Artificial Sequence: Synthetic oligonucleotide
ggagccaatacgacatacaggacgcaata

SEQ ID NO: 669 - DNA, 19 bp, Homo sapiens
gcagtcagtatgatattca

SEQ ID NO: 670 - DNA, 19 bp, Artificial Sequence
  Description of Artificial Sequence: Synthetic oligonucleotide
ggagccaatacgacataca

SEQ ID NO: 671 - DNA, 19 bp, Homo sapiens
gcctcagcctcactcaatt

SEQ ID NO: 672 - DNA, 19 bp, Artificial Sequence
  Description of Artificial Sequence: Synthetic oligonucleotide
gtctgagtctgacacagtt

SEQ ID NO: 673 - DNA, 21 bp, Homo sapiens
gctgacatgatctccttgaaa

SEQ ID NO: 674 - DNA, 21 bp, Artificial Sequence
  Description of Artificial Sequence: Synthetic oligonucleotide
gcagatatgatttcgttaaag

SEQ ID NO: 675 - DNA, 21 bp, Homo sapiens
gctcccgacatgaatcagtaa

SEQ ID NO: 676 - DNA, 21 bp, Artificial Sequence
  Description of Artificial Sequence: Synthetic oligonucleotide
gttcgcgtcacgagtctgtta

SEQ ID NO: 677 - DNA, 19 bp, Homo sapiens
gctcccgacatgaatcagt

SEQ ID NO: 678 - DNA, 19 bp, Artificial Sequence
  Description of Artificial Sequence: Synthetic oligonucleotide
gttcgcgtcacgagtctgt

SEQ ID NO: 679 - DNA, 21 bp, Homo sapiens
gcgtcaggaatttaaccataa

SEQ ID NO: 680 - DNA, 21 bp, Artificial Sequence
  Description of Artificial Sequence: Synthetic oligonucleotide
gtgtgagaaacttgacgatta

SEQ ID NO: 681 - DNA, 19 bp, Homo sapiens
gtcaggaatttaaccataa

SEQ ID NO: 682 - DNA, 19 bp, Artificial Sequence
  Description of Artificial Sequence: Synthetic oligonucleotide
gtgagaaacttgacgatta

SEQ ID NO: 683 - DNA, 19 bp, Homo sapiens
gtgtgattgaccaagacat

SEQ ID NO: 684 - DNA, 19 bp, Artificial Sequence
  Description of Artificial Sequence: Synthetic oligonucleotide
gagtcatagatcaggatat

SEQ ID NO: 685 - DNA, 21 bp, Homo sapiens
gcagcagaggcagtgaaagaa

SEQ ID NO: 686 - DNA, 21 bp, Artificial Sequence
  Description of Artificial Sequence: Synthetic oligonucleotide
gctgctgaagctgtcaaggag

SEQ ID NO: 687 - DNA, 19 bp, Homo sapiens
ggaagtgcatgggaggata

SEQ ID NO: 688 - DNA, 19 bp, Artificial Sequence
  Description of Artificial Sequence: Synthetic oligonucleotide
cgaggtccacggcagaatt

SEQ ID NO: 689 - DNA, 19 bp, Homo sapiens
gaagtgcatgggaggataa

SEQ ID NO: 690 - DNA, 19 bp, Artificial Sequence
  Description of Artificial Sequence: Synthetic oligonucleotide
gaggtccacggcagaatta

SEQ ID NO: 691 - DNA, 21 bp, Homo sapiens
gctccatggtagaagatatca

SEQ ID NO: 692 - DNA, 21 bp, Artificial Sequence
  Description of Artificial Sequence: Synthetic oligonucleotide
ggtcgatggttgaggacatta

SEQ ID NO: 693 - DNA, 19 bp, Homo sapiens
gacgccacagggaattctt

SEQ ID NO: 694 - DNA, 19 bp, Artificial Sequence
  Description of Artificial Sequence: Synthetic oligonucleotide
gatgcgactggcaactcat

SEQ ID NO: 695 - DNA, 19 bp, Homo sapiens
gaattcttcctactcttat

SEQ ID NO: 696 - DNA, 19 bp, Artificial Sequence
  Description of Artificial Sequence: Synthetic oligonucleotide
caactcatcgtattcatac

SEQ ID NO: 697 - DNA, 19 bp, Homo sapiens
gctcctccaaggtcaagtt

SEQ ID NO: 698 - DNA, 19 bp, Artificial Sequence
  Description of Artificial Sequence: Synthetic oligonucleotide
ggtcgtcgaaagtgaaatt

SEQ ID NO: 699 - DNA, 25 bp, Homo sapiens
gctccaacttcaatctcactgtcca

SEQ ID NO: 700 - DNA, 25 bp, Artificial Sequence
  Description of Artificial Sequence: Synthetic oligonucleotide
gttcgaattttaacctgacagtgca

SEQ ID NO: 701 - DNA, 28 bp, Homo sapiens
gccatgaggacactgggattctggactt

SEQ ID NO: 702 - DNA, 28 bp, Artificial Sequence
  Description of Artificial Sequence: Synthetic oligonucleotide
gtcacgaagatacaggcatactcgattt

SEQ ID NO: 703 - DNA, 25 bp, Homo sapiens
gaggacactgggattctggacttca

SEQ ID NO: 704 - DNA, 25 bp, Artificial Sequence
  Description of Artificial Sequence: Synthetic oligonucleotide
gaagatacaggcatactcgatttta

SEQ ID NO: 705 - DNA, 21 bp, Homo sapiens
ggacactgggattctggactt

SEQ ID NO: 706 - DNA, 21 bp, Artificial Sequence
  Description of Artificial Sequence: Synthetic oligonucleotide
agatacaggcatactcgattt

SEQ ID NO: 707 - DNA, 25 bp, Homo sapiens
gagaagaagagcacagcctttcaga

SEQ ID NO: 708 - DNA, 25 bp, Artificial Sequence
  Description of Artificial Sequence: Synthetic oligonucleotide
gaaaaaaaaagtactgcgttccaaa

SEQ ID NO: 709 - DNA, 28 bp, Homo sapiens
gagaagaagagcacagcctttcagaaga

SEQ ID NO: 710 - DNA, 28 bp, Artificial Sequence
  Description of Artificial Sequence: Synthetic oligonucleotide
gaaaaaaaaagtactgcgttccaaaaaa

SEQ ID NO: 711 - DNA, 21 bp, Homo sapiens
ggtgagcaaaggccacaagat

SEQ ID NO: 712 - DNA, 21 bp, Artificial Sequence
  Description of Artificial Sequence: Synthetic oligonucleotide
agtcagtaaggggcataaaat

SEQ ID NO: 713 - DNA, 21 bp, Homo sapiens
gaggtcaaatggctcaagaat

SEQ ID NO: 714 - DNA, 21 bp, Artificial Sequence
  Description of Artificial Sequence: Synthetic oligonucleotide
gaagtgaagtggctgaaaaac

SEQ ID NO: 715 - DNA, 19 bp, Homo sapiens
gaggtcaaatggctcaaga

SEQ ID NO: 716 - DNA, 19 bp, Artificial Sequence
  Description of Artificial Sequence: Synthetic oligonucleotide
gaagtgaagtggctgaaaa

SEQ ID NO: 717 - DNA, 19 bp, Homo sapiens
ggtcaaatggctcaagaat

SEQ ID NO: 718 - DNA, 19 bp, Artificial Sequence
  Description of Artificial Sequence: Synthetic oligonucleotide
agtgaagtggctgaaaaac

SEQ ID NO: 719 - DNA, 29 bp, Homo sapiens
gctcaagaatggccaggagatccagatga

SEQ ID NO: 720 - DNA, 29 bp, Artificial Sequence
  Description of Artificial Sequence: Synthetic oligonucleotide
gctgaaaaacgggcaagaaattcaaatga

SEQ ID NO: 721 - DNA, 21 bp, Homo sapiens
gctcaagaatggccaggagat

SEQ ID NO: 722 - DNA, 21 bp, Artificial Sequence
  Description of Artificial Sequence: Synthetic oligonucleotide
gctgaaaaacgggcaagaaat

SEQ ID NO: 723 - DNA, 29 bp, Artificial Sequence
  Description of Artificial Sequence: Synthetic oligonucleotide
cgaagaaacgtttaagtatcgctttaaaa

SEQ ID NO: 724 - DNA, 21 bp, Homo sapiens
aaggaccgcagcatcttcacg

SEQ ID NO: 725 - DNA, 21 bp, Artificial Sequence
  Description of Artificial Sequence: Synthetic oligonucleotide
aaagatcggagtatttttacc

SEQ ID NO: 726 - DNA, 19 bp, Homo sapiens
gggcagagaaggaagatga

SEQ ID NO: 727 - DNA, 19 bp, Artificial Sequence
  Description of Artificial Sequence: Synthetic oligonucleotide
gcgctgaaaaagaggacga

SEQ ID NO: 728 - DNA, 25 bp, Homo sapiens
gagaaggaagatgagggcgtctaca

SEQ ID NO: 729 - DNA, 25 bp, Artificial Sequence
  Description of Artificial Sequence: Synthetic oligonucleotide
gaaaaagaggacgaaggggtgtata

SEQ ID NO: 730 - DNA, 19 bp, Homo sapiens
gaagatgagggcgtctaca

SEQ ID NO: 731 - DNA, 19 bp, Artificial Sequence
  Description of Artificial Sequence: Synthetic oligonucleotide
gaggacgaaggggtgtata

SEQ ID NO: 732 - DNA, 25 bp, Homo sapiens
gctacatcctggagcgcaagaagaa

SEQ ID NO: 733 - DNA, 25 bp, Artificial Sequence
  Description of Artificial Sequence: Synthetic oligonucleotide
ggtatattctcgaacggaaaaaaaa

SEQ ID NO: 734 - DNA, 21 bp, Homo sapiens
gcgcaagaagaagaagagcta

SEQ ID NO: 735 - DNA, 21 bp, Artificial Sequence
  Description of Artificial Sequence: Synthetic oligonucleotide
acggaaaaaaaaaaaaagtta

SEQ ID NO: 736 - DNA, 19 bp, Homo sapiens
gcaagaagaagaagagcta

SEQ ID NO: 737 - DNA, 19 bp, Artificial Sequence
  Description of Artificial Sequence: Synthetic oligonucleotide
ggaaaaaaaaaaaaagtta

SEQ ID NO: 738 - DNA, 21 bp, Homo sapiens
gcgccagaccattcagaagaa

SEQ ID NO: 739 - DNA, 21 bp, Artificial Sequence
  Description of Artificial Sequence: Synthetic oligonucleotide
ccggcaaacgatacaaaaaaa

SEQ ID NO: 740 - DNA, 19 bp, Homo sapiens
gccagaccattcagaagaa

SEQ ID NO: 741 - DNA, 19 bp, Artificial Sequence
  Description of Artificial Sequence: Synthetic oligonucleotide
ggcaaacgatacaaaaaaa

SEQ ID NO: 742 - DNA, 29 bp, Homo sapiens
ggcatcacctatgagccacccaactataa

SEQ ID NO: 743 - DNA, 29 bp, Artificial Sequence
  Description of Artificial Sequence: Synthetic oligonucleotide
gggattacgtacgaacctccgaattacaa

SEQ ID NO: 744 - DNA, 21 bp, Homo sapiens
gtagccccaagcccaagattt

SEQ ID NO: 745 - DNA, 21 bp, Artificial Sequence
  Description of Artificial Sequence: Synthetic oligonucleotide
gaagtccgaaaccgaaaatat

SEQ ID NO: 746 - DNA, 25 bp, Homo sapiens
gcccaagatttcctggttcaagaat

SEQ ID NO: 747 - DNA, 25 bp, Artificial Sequence
  Description of Artificial Sequence: Synthetic oligonucleotide
accgaaaatatcgtggtttaaaaac

SEQ ID NO: 748 - DNA, 21 bp, Homo sapiens
gcccaagatttcctggttcaa

SEQ ID NO: 749 - DNA, 21 bp, Artificial Sequence
  Description of Artificial Sequence: Synthetic oligonucleotide
accgaaaatatcgtggtttaa

SEQ ID NO: 750 - DNA, 19 bp, Homo sapiens
gatttcctggttcaagaat

SEQ ID NO: 751 - DNA, 19 bp, Artificial Sequence
  Description of Artificial Sequence: Synthetic oligonucleotide
aatatcgtggtttaaaaac

SEQ ID NO: 752 - DNA, 19 bp, Homo sapiens
gttgactctggagattaga

SEQ ID NO: 753 - DNA, 19 bp, Artificial Sequence
  Description of Artificial Sequence: Synthetic oligonucleotide
cttaacactcgaaataagg

SEQ ID NO: 754 - DNA, 29 bp, Homo sapiens
gccatgtcccagcctctcttcaatcaact

SEQ ID NO: 755 - DNA, 29 bp, Artificial Sequence
  Description of Artificial Sequence: Synthetic oligonucleotide
gcgatgtcgcaaccactgtttaaccagct

SEQ ID NO: 756 - DNA, 21 bp, Homo sapiens
gtcccagcctctcttcaatca

SEQ ID NO: 757 - DNA, 21 bp, Artificial Sequence
  Description of Artificial Sequence: Synthetic oligonucleotide
gtcgcaaccactgtttaacca

SEQ ID NO: 758 - DNA, 19 bp, Homo sapiens
gccctgaaacagatggtca

SEQ ID NO: 759 - DNA, 19 bp, Artificial Sequence
  Description of Artificial Sequence: Synthetic oligonucleotide
ggccagagactgacggaca

SEQ ID NO: 760 - DNA, 21 bp, Homo sapiens
gccaaagcaagcctgatctca

SEQ ID NO: 761 - DNA, 21 bp, Artificial Sequence
  Description of Artificial Sequence: Synthetic oligonucleotide
ggcagagtaaaccagacctga

SEQ ID NO: 762 - DNA, 19 bp, Homo sapiens
gccaaagcaagcctgatct

SEQ ID NO: 763 - DNA, 19 bp, Artificial Sequence
  Description of Artificial Sequence: Synthetic oligonucleotide
ggcagagtaaaccagacct

SEQ ID NO: 764 - DNA, 29 bp, Homo sapiens
gccgcatatctgtagcatctgtgacaaga

SEQ ID NO: 765 - DNA, 29 bp, Artificial Sequence
  Description of Artificial Sequence: Synthetic oligonucleotide
accccacatttgcagtatttgcgataaaa

SEQ ID NO: 766 - DNA, 21 bp, Homo sapiens
gcatatctgtagcatctgtga

SEQ ID NO: 767 - DNA, 21 bp, Artificial Sequence
  Description of Artificial Sequence: Synthetic oligonucleotide
ccacatttgcagtatttgcga

SEQ ID NO: 768 - DNA, 19 bp, Homo sapiens
gcatatctgtagcatctgt

SEQ ID NO: 769 - DNA, 19 bp, Artificial Sequence
  Description of Artificial Sequence: Synthetic oligonucleotide
ccacatttgcagtatttgc

SEQ ID NO: 770 - DNA, 19 bp, Homo sapiens
gtagcatctgtgacaagaa

SEQ ID NO: 771 - DNA, 19 bp, Artificial Sequence
  Description of Artificial Sequence: Synthetic oligonucleotide
gcagtatttgcgataaaaa

SEQ ID NO: 772 - DNA, 21 bp, Homo sapiens
gcatctgtgacaagaaggtgt

SEQ ID NO: 773 - DNA, 21 bp, Artificial Sequence
  Description of Artificial Sequence: Synthetic oligonucleotide
gtatttgcgataaaaaagtct

SEQ ID NO: 774 - DNA, 25 bp, Homo sapiens
gaaagggaagctgcacgctcagaaa

SEQ ID NO: 775 - DNA, 25 bp, Artificial Sequence
  Description of Artificial Sequence: Synthetic oligonucleotide
caagggcaaactccatgcacaaaag

SEQ ID NO: 776 - DNA, 21 bp, Homo sapiens
ggaagctgcacgctcagaaat

SEQ ID NO: 777 - DNA, 21 bp, Artificial Sequence
  Description of Artificial Sequence: Synthetic oligonucleotide
gcaaactccatgcacaaaagt

SEQ ID NO: 778 - DNA, 19 bp, Homo sapiens
gaagctgcacgctcagaaa

SEQ ID NO: 779 - DNA, 19 bp, Artificial Sequence
  Description of Artificial Sequence: Synthetic oligonucleotide
caaactccatgcacaaaag

SEQ ID NO: 780 - DNA, 19 bp, Homo sapiens
gctcagaaatgcctggtct

SEQ ID NO: 781 - DNA, 19 bp, Artificial Sequence
  Description of Artificial Sequence: Synthetic oligonucleotide
gcacaaaagtgtctcgtgt

SEQ ID NO: 782 - DNA, 21 bp, Homo sapiens
gctggcatccggtgtatactt

SEQ ID NO: 783 - DNA, 21 bp, Artificial Sequence
  Description of Artificial Sequence: Synthetic oligonucleotide
gcagggattcgctgcattcta

SEQ ID NO: 784 - DNA, 29 bp, Homo sapiens
gctgtttataaccctgctgggaatgaaga

SEQ ID NO: 785 - DNA, 29 bp, Artificial Sequence
  Description of Artificial Sequence: Synthetic oligonucleotide
gcagtatacaatccagcaggcaacgagga

SEQ ID NO: 786 - DNA, 29 bp, Homo sapiens
gcccattccagcaaggtcattcactcagt

SEQ ID NO: 787 - DNA, 29 bp, Artificial Sequence
  Description of Artificial Sequence: Synthetic oligonucleotide
cccgatacctgctagatcttttacacaat

SEQ ID NO: 788 - DNA, 21 bp, Homo sapiens
gcccattccagcaaggtcatt

SEQ ID NO: 789 - DNA, 21 bp, Artificial Sequence
  Description of Artificial Sequence: Synthetic oligonucleotide
cccgatacctgctagatcttt

SEQ ID NO: 790 - DNA, 21 bp, Homo sapiens
gcaaggtcattcactcagtca

SEQ ID NO: 791 - DNA, 21 bp, Artificial Sequence
  Description of Artificial Sequence: Synthetic oligonucleotide
gctagatcttttacacaatct

SEQ ID NO: 792 - DNA, 19 bp, Homo sapiens
gcaaggtcattcactcagt

SEQ ID NO: 793 - DNA, 19 bp, Artificial Sequence
  Description of Artificial Sequence: Synthetic oligonucleotide
gctagatcttttacacaat

SEQ ID NO: 794 - DNA, 29 bp, Artificial Sequence
  Description of Artificial Sequence: Synthetic oligonucleotide
gatcttttacacaatctagtccgactttc

SEQ ID NO: 795 - DNA, 21 bp, Homo sapiens
gaaggaagctgcactgagaat

SEQ ID NO: 796 - DNA, 21 bp, Artificial Sequence
  Description of Artificial Sequence: Synthetic oligonucleotide
gagggtagttgtacagaaaac

SEQ ID NO: 797 - DNA, 19 bp, Homo sapiens
gaaggaagctgcactgaga

SEQ ID NO: 798 - DNA, 19 bp, Artificial Sequence
  Description of Artificial Sequence: Synthetic oligonucleotide
gagggtagttgtacagaaa

SEQ ID NO: 799 - DNA, 29 bp, Homo sapiens
gaagctgcacaggccatggtccagtatta

SEQ ID NO: 800 - DNA, 29 bp, Artificial Sequence
  Description of Artificial Sequence: Synthetic oligonucleotide
gaggcagctcaagcgatggtgcaatacta

SEQ ID NO: 801 - DNA, 29 bp, Homo sapiens
gctgcacaggccatggtccagtattatca

SEQ ID NO: 802 - DNA, 29 bp, Artificial Sequence
  Description of Artificial Sequence: Synthetic oligonucleotide
gcagctcaagcgatggtgcaatactacca

SEQ ID NO: 803 - DNA, 29 bp, Homo sapiens
gcacaggccatggtccagtattatcaaga

SEQ ID NO: 804 - DNA, 29 bp, Artificial Sequence
  Description of Artificial Sequence: Synthetic oligonucleotide
gctcaagcgatggtgcaatactaccagga

SEQ ID NO: 805 - DNA, 25 bp, Homo sapiens
ggccatggtccagtattatcaagaa

SEQ ID NO: 806 - DNA, 25 bp, Artificial Sequence
  Description of Artificial Sequence: Synthetic oligonucleotide
agcgatggtgcaatactaccaggag

SEQ ID NO: 807 - DNA, 21 bp, Homo sapiens
ggccatggtccagtattatca

SEQ ID NO: 808 - DNA, 21 bp, Artificial Sequence
  Description of Artificial Sequence: Synthetic oligonucleotide
agcgatggtgcaatactacca

SEQ ID NO: 809 - DNA, 19 bp, Homo sapiens
ggccatggtccagtattat

SEQ ID NO: 810 - DNA, 19 bp, Artificial Sequence
  Description of Artificial Sequence: Synthetic oligonucleotide
agcgatggtgcaatactac

SEQ ID NO: 811 - DNA, 25 bp, Homo sapiens
gccatggtccagtattatcaagaaa

SEQ ID NO: 812 - DNA, 25 bp, Artificial Sequence
  Description of Artificial Sequence: Synthetic oligonucleotide
gcgatggtgcaatactaccaggaga

SEQ ID NO: 813 - DNA, 19 bp, Homo sapiens
ggtccagtattatcaagaa

SEQ ID NO: 814 - DNA, 19 bp, Artificial Sequence
  Description of Artificial Sequence: Synthetic oligonucleotide
ggtgcaatactaccaggag

SEQ ID NO: 815 - DNA, 19 bp, Homo sapiens
gtccagtattatcaagaaa

SEQ ID NO: 816 - DNA, 19 bp, Artificial Sequence
  Description of Artificial Sequence: Synthetic oligonucleotide
gtgcaatactaccaggaga

SEQ ID NO: 817 - DNA, 19 bp, Homo sapiens
gctgtgatcaatggtgaga

SEQ ID NO: 818 - DNA, 19 bp, Artificial Sequence
  Description of Artificial Sequence: Synthetic oligonucleotide
gcagtcattaacggagaaa

SEQ ID NO: 819 - DNA, 29 bp, Homo sapiens
gaagttgctcattcggatgtccaagagat

SEQ ID NO: 820 - DNA, 29 bp, Artificial Sequence
  Description of Artificial Sequence: Synthetic oligonucleotide
aaaattactgatacgcatgtcgaaaaggt

SEQ ID NO: 821 - DNA, 29 bp, Homo sapiens
gttgctcattcggatgtccaagagataca

SEQ ID NO: 822 - DNA, 29 bp, Artificial Sequence
  Description of Artificial Sequence: Synthetic oligonucleotide
attactgatacgcatgtcgaaaaggtata

SEQ ID NO: 823 - DNA, 25 bp, Homo sapiens
gttgctcattcggatgtccaagaga

SEQ ID NO: 824 - DNA, 25 bp, Artificial Sequence
  Description of Artificial Sequence: Synthetic oligonucleotide
attactgatacgcatgtcgaaaagg

SEQ ID NO: 825 - DNA, 19 bp, Homo sapiens
ggatgtccaagagatacaa

SEQ ID NO: 826 - DNA, 19 bp, Artificial Sequence
  Description of Artificial Sequence: Synthetic oligonucleotide
gcatgtcgaaaaggtataa

SEQ ID NO: 827 - DNA, 19 bp, Homo sapiens
ggaattgcagctcaagaaa

SEQ ID NO: 828 - DNA, 19 bp, Artificial Sequence
  Description of Artificial Sequence: Synthetic oligonucleotide
agagttacaactgaaaaag

SEQ ID NO: 829 - DNA, 29 bp, Homo sapiens
gtgggcagacaggagaaagaagcagagtt

SEQ ID NO: 830 - DNA, 29 bp, Artificial Sequence
  Description of Artificial Sequence: Synthetic oligonucleotide
gtcgggaggcaagaaaaggaggctgaatt

SEQ ID NO: 831 - DNA, 21 bp, Homo sapiens
gtgggcagacaggagaaagaa

SEQ ID NO: 832 - DNA, 21 bp, Artificial Sequence
  Description of Artificial Sequence: Synthetic oligonucleotide
gtcgggaggcaagaaaaggag

SEQ ID NO: 833 - DNA, 19 bp, Homo sapiens
gggcagacaggagaaagaa

SEQ ID NO: 834 - DNA, 19 bp, Artificial Sequence
  Description of Artificial Sequence: Synthetic oligonucleotide
cgggaggcaagaaaaggag

SEQ ID NO: 835 - DNA, 25 bp, Homo sapiens
gcagacaggagaaagaagcagagtt

SEQ ID NO: 836 - DNA, 25 bp, Artificial Sequence
  Description of Artificial Sequence: Synthetic oligonucleotide
ggaggcaagaaaaggaggctgaatt

SEQ ID NO: 837 - DNA, 21 bp, Homo sapiens
aagaagcagagttctctgatc

SEQ ID NO: 838 - DNA, 21 bp, Artificial Sequence
  Description of Artificial Sequence: Synthetic oligonucleotide
aggaggctgaattttcagacc

SEQ ID NO: 839 - DNA, 29 bp, Homo sapiens
gagctggaagaaattgtgcccattgacca

SEQ ID NO: 840 - DNA, 29 bp, Artificial Sequence
  Description of Artificial Sequence: Synthetic oligonucleotide
gaactcgaggagatagtcccgatagatca

SEQ ID NO: 841 - DNA, 21 bp, Homo sapiens
gcccattgaccagaaagacaa

SEQ ID NO: 842 - DNA, 21 bp, Artificial Sequence
  Description of Artificial Sequence: Synthetic oligonucleotide
cccgatagatcaaaaggataa

SEQ ID NO: 843 - DNA, 21 bp, Homo sapiens
gtgtgacaaccaccttagact

SEQ ID NO: 844 - DNA, 21 bp, Artificial Sequence
  Description of Artificial Sequence: Synthetic oligonucleotide
gcgtcactacgacgttggatt

SEQ ID NO: 845 - DNA, 19 bp, Homo sapiens
gtgtgacaaccaccttaga

SEQ ID NO: 846 - DNA, 19 bp, Artificial Sequence
  Description of Artificial Sequence: Synthetic oligonucleotide
gcgtcactacgacgttgga

SEQ ID NO: 847 - DNA, 21 bp, Homo sapiens
gtgacaaccaccttagactta

SEQ ID NO: 848 - DNA, 21 bp, Artificial Sequence
  Description of Artificial Sequence: Synthetic oligonucleotide
gtcactacgacgttggatttg

SEQ ID NO: 849 - DNA, 19 bp, Homo sapiens
gtgacaaccaccttagact

SEQ ID NO: 850 - DNA, 19 bp, Artificial Sequence
  Description of Artificial Sequence: Synthetic oligonucleotide
gtcactacgacgttggatt

SEQ ID NO: 851 - DNA, 19 bp, Homo sapiens
gacaaccaccttagactta

SEQ ID NO: 852 - DNA, 19 bp, Artificial Sequence
  Description of Artificial Sequence: Synthetic oligonucleotide
cactacgacgttggatttg

SEQ ID NO: 853 - DNA, 21 bp, Homo sapiens
gcagaaatcagcctcaagtca

SEQ ID NO: 854 - DNA, 21 bp, Artificial Sequence
  Description of Artificial Sequence: Synthetic oligonucleotide
gctgagattagtctgaaatct

SEQ ID NO: 855 - DNA, 19 bp, Homo sapiens
gcagaaatcagcctcaagt

SEQ ID NO: 856 - DNA, 19 bp, Artificial Sequence
  Description of Artificial Sequence: Synthetic oligonucleotide
gctgagattagtctgaaat

SEQ ID NO: 857 - DNA, 29 bp, Homo sapiens
gaaatcagcctcaagtcacccagagaact

SEQ ID NO: 858 - DNA, 29 bp, Artificial Sequence
  Description of Artificial Sequence: Synthetic oligonucleotide
gagattagtctgaaatctccgagggagct

SEQ ID NO: 859 - DNA, 29 bp, Homo sapiens
gcaaagggagtggagagctcagatgttca

SEQ ID NO: 860 - DNA, 29 bp, Artificial Sequence
  Description of Artificial Sequence: Synthetic oligonucleotide
gctaaaggtgtcgaaagttctgacgtaca

SEQ ID NO: 861 - DNA, 21 bp, Homo sapiens
ggagtggagagctcagatgtt

SEQ ID NO: 862 - DNA, 21 bp, Artificial Sequence
  Description of Artificial Sequence: Synthetic oligonucleotide
ggtgtcgaaagttctgacgta

SEQ ID NO: 863 - DNA, 19 bp, Homo sapiens
gagtggagagctcagatgt

SEQ ID NO: 864 - DNA, 19 bp, Artificial Sequence
  Description of Artificial Sequence: Synthetic oligonucleotide
gtgtcgaaagttctgacgt

SEQ ID NO: 865 - DNA, 19 bp, Homo sapiens
gtggatgattgcaagacca

SEQ ID NO: 866 - DNA, 19 bp, Artificial Sequence
  Description of Artificial Sequence: Synthetic oligonucleotide
gtcgacgactgtaaaacga

SEQ ID NO: 867 - DNA, 19 bp, Homo sapiens
gaggtcaccagagtacact

SEQ ID NO: 868 - DNA, 19 bp, Artificial Sequence
  Description of Artificial Sequence: Synthetic oligonucleotide
cagatctcctgaatataca

SEQ ID NO: 869 - DNA, 25 bp, Homo sapiens
gtcaatgagaatacgaggatgtaca

SEQ ID NO: 870 - DNA, 25 bp, Artificial Sequence
  Description of Artificial Sequence: Synthetic oligonucleotide
gtgaacgaaaacaccagaatgtata

SEQ ID NO: 871 - DNA, 29 bp, Artificial Sequence
  Description of Artificial Sequence: Synthetic oligonucleotide
cgagcgtgtcgagtacctgttcctgatta

SEQ ID NO: 872 - DNA, 21 bp, Homo sapiens
ggagaagcagcagctagaaga

SEQ ID NO: 873 - DNA, 21 bp, Artificial Sequence
  Description of Artificial Sequence: Synthetic oligonucleotide
cgaaaaacaacaacttgagga

SEQ ID NO: 874 - DNA, 19 bp, Homo sapiens
ggagaagcagcagctagaa

SEQ ID NO: 875 - DNA, 19 bp, Artificial Sequence
  Description of Artificial Sequence: Synthetic oligonucleotide
cgaaaaacaacaacttgag

SEQ ID NO: 876 - DNA, 25 bp, Homo sapiens
gcagcagctagaagaggatctcaaa

SEQ ID NO: 877 - DNA, 25 bp, Artificial Sequence
  Description of Artificial Sequence: Synthetic oligonucleotide
acaacaacttgaggaagacctgaag

SEQ ID NO: 878 - DNA, 21 bp, Homo sapiens
gcagcagctagaagaggatct

SEQ ID NO: 879 - DNA, 21 bp, Artificial Sequence
  Description of Artificial Sequence: Synthetic oligonucleotide
acaacaacttgaggaagacct

SEQ ID NO: 880 - DNA, 21 bp, Homo sapiens
gcagctagaagaggatctcaa

SEQ ID NO: 881 - DNA, 21 bp, Artificial Sequence
  Description of Artificial Sequence: Synthetic oligonucleotide
acaacttgaggaagacctgaa

SEQ ID NO: 882 - DNA, 19 bp, Homo sapiens
gctagaagaggatctcaaa

SEQ ID NO: 883 - DNA, 19 bp, Artificial Sequence
  Description of Artificial Sequence: Synthetic oligonucleotide
acttgaggaagacctgaag

SEQ ID NO: 884 - DNA, 25 bp, Homo sapiens
gattggatcactcaggccgaagaca

SEQ ID NO: 885 - DNA, 25 bp, Artificial Sequence
  Description of Artificial Sequence: Synthetic oligonucleotide
gactggattacacaagcggaggata

SEQ ID NO: 886 - DNA, 29 bp, Homo sapiens
gctccttctcctcttcctcttcatcatca

SEQ ID NO: 887 - DNA, 29 bp, Artificial Sequence
  Description of Artificial Sequence: Synthetic oligonucleotide
cctgctactgctgtttctgtttattatta

SEQ ID NO: 888 - DNA, 21 bp, Homo sapiens
aagttcaactttgatgagatg

SEQ ID NO: 889 - DNA, 21 bp, Artificial Sequence
  Description of Artificial Sequence: Synthetic oligonucleotide
aaatttaatttcgacgaaatg

SEQ ID NO: 890 - DNA, 21 bp, Homo sapiens
ggactggaattcggtgatgta

SEQ ID NO: 891 - DNA, 21 bp, Artificial Sequence
  Description of Artificial Sequence: Synthetic oligonucleotide
agattggaactccgtcatgta

SEQ ID NO: 892 - DNA, 21 bp, Homo sapiens
gactggaattcggtgatgtat

SEQ ID NO: 893 - DNA, 21 bp, Artificial Sequence
  Description of Artificial Sequence: Synthetic oligonucleotide
gattggaactccgtcatgtac

SEQ ID NO: 894 - DNA, 19 bp, Homo sapiens
gactggaattcggtgatgt

SEQ ID NO: 895 - DNA, 19 bp, Artificial Sequence
  Description of Artificial Sequence: Synthetic oligonucleotide
gattggaactccgtcatgt

SEQ ID NO: 896 - DNA, 19 bp, Homo sapiens
ggaattcggtgatgtatga

SEQ ID NO: 897 - DNA, 19 bp, Artificial Sequence
  Description of Artificial Sequence: Synthetic oligonucleotide
ggaactccgtcatgtacga

SEQ ID NO: 898 - DNA, 29 bp, Homo sapiens
ggaggaggaagaggagaaggagagaaaga

SEQ ID NO: 899 - DNA, 29 bp, Artificial Sequence
  Description of Artificial Sequence: Synthetic oligonucleotide
agaagaagaggaagaaaaagaaaggaaaa

SEQ ID NO: 900 - DNA, 19 bp, Homo sapiens
gccggaactacttcaacat

SEQ ID NO: 901 - DNA, 19 bp, Artificial Sequence
  Description of Artificial Sequence: Synthetic oligonucleotide
gtcgcaattattttaatat

SEQ ID NO: 902 - DNA, 29 bp, Homo sapiens
gtccagtgcaatcaatgtcgtgaagatct

SEQ ID NO: 903 - DNA, 29 bp, Artificial Sequence
  Description of Artificial Sequence: Synthetic oligonucleotide
atcgagcgctattaacgtggtcaaaattt

SEQ ID NO: 904 - DNA, 29 bp, Homo sapiens
gctcttcaagggaaagctgtacacctgtt

SEQ ID NO: 905 - DNA, 29 bp, Artificial Sequence
  Description of Artificial Sequence: Synthetic oligonucleotide
actgtttaaaggtaaactctatacgtgct

SEQ ID NO: 906 - DNA, 25 bp, Homo sapiens
gggagcaggagtacaagaactgtga

SEQ ID NO: 907 - DNA, 25 bp, Artificial Sequence
  Description of Artificial Sequence: Synthetic oligonucleotide
gcgaacaagaatataaaaattgcga

SEQ ID NO: 908 - DNA, 21 bp, Homo sapiens
gggagcaggagtacaagaact

SEQ ID NO: 909 - DNA, 21 bp, Artificial Sequence
  Description of Artificial Sequence: Synthetic oligonucleotide
gcgaacaagaatataaaaatt

SEQ ID NO: 910 - DNA, 21 bp, Homo sapiens
gagcaggagtacaagaactgt

SEQ ID NO: 911 - DNA, 21 bp, Artificial Sequence
  Description of Artificial Sequence: Synthetic oligonucleotide
gaacaagaatataaaaattgc

SEQ ID NO: 912 - DNA, 21 bp, Homo sapiens
gcaggagtacaagaactgtga

SEQ ID NO: 913 - DNA, 21 bp, Artificial Sequence
  Description of Artificial Sequence: Synthetic oligonucleotide
acaagaatataaaaattgcga

SEQ ID NO: 914 - DNA, 21 bp, Homo sapiens
ggaacaacaactttcagacct

SEQ ID NO: 915 - DNA, 21 bp, Artificial Sequence
  Description of Artificial Sequence: Synthetic oligonucleotide
gcaataataatttccaaacgt

SEQ ID NO: 916 - DNA, 21 bp, Homo sapiens
gaagccaagggtcgtatcaaa

SEQ ID NO: 917 - DNA, 21 bp, Artificial Sequence
  Description of Artificial Sequence: Synthetic oligonucleotide
gaggcgaaaggacgaattaag

SEQ ID NO: 918 - DNA, 19 bp, Homo sapiens
gaagccaagggtcgtatca

SEQ ID NO: 919 - DNA, 19 bp, Artificial Sequence
  Description of Artificial Sequence: Synthetic oligonucleotide
gaggcgaaaggacgaatta

SEQ ID NO: 920 - DNA, 25 bp, Homo sapiens
gcagtgttcctgagtatgtctacaa

SEQ ID NO: 921 - DNA, 25 bp, Artificial Sequence
  Description of Artificial Sequence: Synthetic oligonucleotide
gtagcgtaccagaatacgtgtataa

SEQ ID NO: 922 - DNA, 19 bp, Homo sapiens
gcagtgttcctgagtatgt

SEQ ID NO: 923 - DNA, 19 bp, Artificial Sequence
  Description of Artificial Sequence: Synthetic oligonucleotide
gtagcgtaccagaatacgt

SEQ ID NO: 924 - DNA, 21 bp, Homo sapiens
gtgttcctgagtatgtctaca

SEQ ID NO: 925 - DNA, 21 bp, Artificial Sequence
  Description of Artificial Sequence: Synthetic oligonucleotide
gcgtaccagaatacgtgtata

SEQ ID NO: 926 - DNA, 29 bp, Homo sapiens
gttcctgagtatgtctacaacctacactt

SEQ ID NO: 927 - DNA, 29 bp, Artificial Sequence
  Description of Artificial Sequence: Synthetic oligonucleotide
gtaccagaatacgtgtataatcttcattt

SEQ ID NO: 928 - DNA, 19 bp, Homo sapiens
gttcctgagtatgtctaca

SEQ ID NO: 929 - DNA, 19 bp, Artificial Sequence
  Description of Artificial Sequence: Synthetic oligonucleotide
gtaccagaatacgtgtata

SEQ ID NO: 930 - DNA, 19 bp, Homo sapiens
gctaaaggctggcacaact

SEQ ID NO: 931 - DNA, 19 bp, Artificial Sequence
  Description of Artificial Sequence: Synthetic oligonucleotide
gcttaaagcagggactaca

SEQ ID NO: 932 - DNA, 19 bp, Homo sapiens
gcacaactgccacttatga

SEQ ID NO: 933 - DNA, 19 bp, Artificial Sequence
  Description of Artificial Sequence: Synthetic oligonucleotide
ggactacagcgacatacga

SEQ ID NO: 934 - DNA, 21 bp, Homo sapiens
gggaagaggaacagcacagta

SEQ ID NO: 935 - DNA, 21 bp, Artificial Sequence
  Description of Artificial Sequence: Synthetic oligonucleotide
gggtaggggtactgctcaata

SEQ ID NO: 936 - DNA, 21 bp, Homo sapiens
gaagaggaacagcacagtaca

SEQ ID NO: 937 - DNA, 21 bp, Artificial Sequence
  Description of Artificial Sequence: Synthetic oligonucleotide
gtaggggtactgctcaatata

SEQ ID NO: 938 - DNA, 19 bp, Homo sapiens
gaagaggaacagcacagta

SEQ ID NO: 939 - DNA, 19 bp, Artificial Sequence
  Description of Artificial Sequence: Synthetic oligonucleotide
gtaggggtactgctcaata

SEQ ID NO: 940 - DNA, 21 bp, Homo sapiens
ctctgaggagactggagattt

SEQ ID NO: 941 - DNA, 21 bp, Artificial Sequence
  Description of Artificial Sequence: Synthetic oligonucleotide
cactcagaaggctcgaaatat

SEQ ID NO: 942 - DNA, 19 bp, Homo sapiens
gaggagactggagatttct

SEQ ID NO: 943 - DNA, 19 bp, Artificial Sequence
  Description of Artificial Sequence: Synthetic oligonucleotide
cagaaggctcgaaatatca

SEQ ID NO: 944 - DNA, 29 bp, Homo sapiens
gctcactacacgcacagcgattaccagta

SEQ ID NO: 945 - DNA, 29 bp, Artificial Sequence
  Description of Artificial Sequence: Synthetic oligonucleotide
gcacattatacccatagtgactatcaata

SEQ ID NO: 946 - DNA, 19 bp, Homo sapiens
gtaccagcatggctctgtt

SEQ ID NO: 947 - DNA, 19 bp, Artificial Sequence
  Description of Artificial Sequence: Synthetic oligonucleotide
atatcaacacgggtcagta

SEQ ID NO: 948 - DNA, 29 bp, Homo sapiens
ggcaacctcttggagaaggagaactacct

SEQ ID NO: 949 - DNA, 29 bp, Artificial Sequence
  Description of Artificial Sequence: Synthetic oligonucleotide
gggaatctgttagaaaaagaaaattatct

SEQ ID NO: 950 - DNA, 25 bp, Homo sapiens
ggaatgcagacatggagatgactct

SEQ ID NO: 951 - DNA, 25 bp, Artificial Sequence
  Description of Artificial Sequence: Synthetic oligonucleotide
gcaacgctgatatggaaatgacact

SEQ ID NO: 952 - DNA, 21 bp, Homo sapiens
ggaatgcagacatggagatga

SEQ ID NO: 953 - DNA, 21 bp, Artificial Sequence
  Description of Artificial Sequence: Synthetic oligonucleotide
gcaacgctgatatggaaatga

SEQ ID NO: 954 - DNA, 19 bp, Homo sapiens
gggccttgagaaacttagt

SEQ ID NO: 955 - DNA, 19 bp, Artificial Sequence
  Description of Artificial Sequence: Synthetic oligonucleotide
gcgcgttaaggaatttggt

SEQ ID NO: 956 - DNA, 19 bp, Homo sapiens
ggccttgagaaacttagta

SEQ ID NO: 957 - DNA, 19 bp, Artificial Sequence
  Description of Artificial Sequence: Synthetic oligonucleotide
cgcgttaaggaatttggtt

SEQ ID NO: 958 - DNA, 29 bp, Homo sapiens
gacaacaaattggaggtggctgaactaaa

SEQ ID NO: 959 - DNA, 29 bp, Artificial Sequence
  Description of Artificial Sequence: Synthetic oligonucleotide
gataataagttagaagtcgcagagcttaa

SEQ ID NO: 960 - DNA, 29 bp, Homo sapiens
gctgaagcaaaccagagacttggagacta

SEQ ID NO: 961 - DNA, 29 bp, Artificial Sequence
  Description of Artificial Sequence: Synthetic oligonucleotide
cctcaaacagacgagggatttagaaacaa

SEQ ID NO: 962 - DNA, 21 bp, Homo sapiens
gctgaagcaaaccagagactt

SEQ ID NO: 963 - DNA, 21 bp, Artificial Sequence
  Description of Artificial Sequence: Synthetic oligonucleotide
cctcaaacagacgagggattt

SEQ ID NO: 964 - DNA, 25 bp, Homo sapiens
gaagcaaaccagagacttggagact

SEQ ID NO: 965 - DNA, 25 bp, Artificial Sequence
  Description of Artificial Sequence: Synthetic oligonucleotide
caaacagacgagggatttagaaaca

SEQ ID NO: 966 - DNA, 25 bp, Homo sapiens
gcaaaccagagacttggagactaaa

SEQ ID NO: 967 - DNA, 25 bp, Artificial Sequence
  Description of Artificial Sequence: Synthetic oligonucleotide
acagacgagggatttagaaacaaag

SEQ ID NO: 968 - DNA, 21 bp, Homo sapiens
ggatgcctaagaaacatgagt

SEQ ID NO: 969 - DNA, 21 bp, Artificial Sequence
  Description of Artificial Sequence: Synthetic oligonucleotide
ggttgtcttaggaatatgagc

SEQ ID NO: 970 - DNA, 19 bp, Homo sapiens
ggatgcctaagaaacatga

SEQ ID NO: 971 - DNA, 19 bp, Artificial Sequence
  Description of Artificial Sequence: Synthetic oligonucleotide
ggttgtcttaggaatatga

SEQ ID NO: 972 - DNA, 21 bp, Homo sapiens
gatgcctaagaaacatgagtt

SEQ ID NO: 973 - DNA, 21 bp, Artificial Sequence
  Description of Artificial Sequence: Synthetic oligonucleotide
gttgtcttaggaatatgagct

SEQ ID NO: 974 - DNA, 21 bp, Homo sapiens
gagaagatgtgacggactcat

SEQ ID NO: 975 - DNA, 21 bp, Artificial Sequence
  Description of Artificial Sequence: Synthetic oligonucleotide
gaggaggtgcgatggtctgat

SEQ ID NO: 976 - DNA, 19 bp, Homo sapiens
gaagatgtgacggactcat

SEQ ID NO: 977 - DNA, 19 bp, Artificial Sequence
  Description of Artificial Sequence: Synthetic oligonucleotide
ggaggtgcgatggtctgat

SEQ ID NO: 978 - DNA, 19 bp, Homo sapiens
gaggaaccattgcagatta

SEQ ID NO: 979 - DNA, 19 bp, Artificial Sequence
  Description of Artificial Sequence: Synthetic oligonucleotide
ggggtacgatagctgacta

SEQ ID NO: 980 - DNA, 29 bp, Homo sapiens
ggaaccattgcagattaccagccagatga

SEQ ID NO: 981 - DNA, 29 bp, Artificial Sequence
  Description of Artificial Sequence: Synthetic oligonucleotide
ggtacgatagctgactatcaacctgacga

SEQ ID NO: 982 - DNA, 19 bp, Homo sapiens
gaaccattgcagattacca

SEQ ID NO: 983 - DNA, 19 bp, Artificial Sequence
  Description of Artificial Sequence: Synthetic oligonucleotide
gtacgatagctgactatca

SEQ ID NO: 984 - DNA, 21 bp, Homo sapiens
gatgacaaggccacggagaat

SEQ ID NO: 985 - DNA, 21 bp, Artificial Sequence
  Description of Artificial Sequence: Synthetic oligonucleotide
gacgataaagcgaccgaaaac

SEQ ID NO: 986 - DNA, 25 bp, Homo sapiens
gcattcttcataacctctcctacca

SEQ ID NO: 987 - DNA, 25 bp, Artificial Sequence
  Description of Artificial Sequence: Synthetic oligonucleotide
gtatactacacaatctgtcgtatca

SEQ ID NO: 988 - DNA, 21 bp, Homo sapiens
gcattcttcataacctctcct

SEQ ID NO: 989 - DNA, 21 bp, Artificial Sequence
  Description of Artificial Sequence: Synthetic oligonucleotide
gtatactacacaatctgtcgt

SEQ ID NO: 990 - DNA, 21 bp, Artificial Sequence
  Description of Artificial Sequence: Synthetic oligonucleotide
gctgaactgcctgaaaagtac

SEQ ID NO: 991 - DNA, 21 bp, Homo sapiens
ggcagtcgaagcaggaaagta

SEQ ID NO: 992 - DNA, 21 bp, Artificial Sequence
  Description of Artificial Sequence: Synthetic oligonucleotide
gggagccgtagtagaaaggtt

SEQ ID NO: 993 - DNA, 21 bp, Homo sapiens
gcagtcgaagcaggaaagtaa

SEQ ID NO: 994 - DNA, 21 bp, Artificial Sequence
  Description of Artificial Sequence: Synthetic oligonucleotide
ggagccgtagtagaaaggtta

SEQ ID NO: 995 - DNA, 19 bp, Homo sapiens
gtcgaagcaggaaagtaaa

SEQ ID NO: 996 - DNA, 19 bp, Artificial Sequence
  Description of Artificial Sequence: Synthetic oligonucleotide
gccgtagtagaaaggttaa

SEQ ID NO: 997 - DNA, 25 bp, Homo sapiens
gtggctgtggcattccattgttata

SEQ ID NO: 998 - DNA, 25 bp, Artificial Sequence
  Description of Artificial Sequence: Synthetic oligonucleotide
atggctctggcactcgatagtaatt

SEQ ID NO: 999 - DNA, 21 bp, Homo sapiens
ggctgtggcattccattgtta

SEQ ID NO: 1000 - DNA, 21 bp, Artificial Sequence
  Description of Artificial Sequence: Synthetic oligonucleotide
ggctctggcactcgatagtaa

SEQ ID NO: 1001 - DNA, 21 bp, Homo sapiens
gctgtggcattccattgttat

SEQ ID NO: 1002 - DNA, 21 bp, Artificial Sequence
  Description of Artificial Sequence: Synthetic oligonucleotide
gctctggcactcgatagtaat

SEQ ID NO: 1003 - DNA, 19 bp, Homo sapiens
gctgtggcattccattgtt

SEQ ID NO: 1004 - DNA, 19 bp, Artificial Sequence
  Description of Artificial Sequence: Synthetic oligonucleotide
gctctggcactcgatagta

SEQ ID NO: 1005 - DNA, 19 bp, Homo sapiens
gtggcattccattgttata

SEQ ID NO: 1006 - DNA, 19 bp, Artificial Sequence
  Description of Artificial Sequence: Synthetic oligonucleotide
ctggcactcgatagtaatt

SEQ ID NO: 1007 - DNA, 21 bp, Homo sapiens
aagacagccatctcgctgctg

SEQ ID NO: 1008 - DNA, 21 bp, Artificial Sequence
  Description of Artificial Sequence: Synthetic oligonucleotide
aaaactgcgatttccctcctc

SEQ ID NO: 1009 - DNA, 25 bp, Homo sapiens
gctgaggaatctgtcccggaatctt

SEQ ID NO: 1010 - DNA, 25 bp, Artificial Sequence
  Description of Artificial Sequence: Synthetic oligonucleotide
cctcagaaacctctcgcgcaaccta

SEQ ID NO: 1011 - DNA, 25 bp, Homo sapiens
gaggaatctgtcccggaatctttct

SEQ ID NO: 1012 - DNA, 25 bp, Artificial Sequence
  Description of Artificial Sequence: Synthetic oligonucleotide
cagaaacctctcgcgcaacctatca

SEQ ID NO: 1013 - DNA, 21 bp, Homo sapiens
ggaatctgtcccggaatcttt

SEQ ID NO: 1014 - DNA, 21 bp, Artificial Sequence
  Description of Artificial Sequence: Synthetic oligonucleotide
gaaacctctcgcgcaacctat

SEQ ID NO: 1015 - DNA, 19 bp, Homo sapiens
gaatctgtcccggaatctt

SEQ ID NO: 1016 - DNA, 19 bp, Artificial Sequence
  Description of Artificial Sequence: Synthetic oligonucleotide
aaacctctcgcgcaaccta

SEQ ID NO: 1017 - DNA, 25 bp, Homo sapiens
gaaggctcagtttaagaagacagat

SEQ ID NO: 1018 - DNA, 25 bp, Artificial Sequence
  Description of Artificial Sequence: Synthetic oligonucleotide
aaaagcacaattcaaaaaaactgac

SEQ ID NO: 1019 - DNA, 21 bp, Homo sapiens
aaggctcagtttaagaagaca

SEQ ID NO: 1020 - DNA, 21 bp, Artificial Sequence
  Description of Artificial Sequence: Synthetic oligonucleotide
aaagcacaattcaaaaaaact

SEQ ID NO: 1021 - DNA, 21 bp, Homo sapiens
ggctcagtttaagaagacaga

SEQ ID NO: 1022 - DNA, 21 bp, Artificial Sequence
  Description of Artificial Sequence: Synthetic oligonucleotide
agcacaattcaaaaaaactga

SEQ ID NO: 1023 - DNA, 19 bp, Homo sapiens
ggctcagtttaagaagaca

SEQ ID NO: 1024 - DNA, 19 bp, Artificial Sequence
  Description of Artificial Sequence: Synthetic oligonucleotide
agcacaattcaaaaaaact

SEQ ID NO: 1025 - DNA, 21 bp, Homo sapiens
gctcagtttaagaagacagat

SEQ ID NO: 1026 - DNA, 21 bp, Artificial Sequence
  Description of Artificial Sequence: Synthetic oligonucleotide
gcacaattcaaaaaaactgac

SEQ ID NO: 1027 - DNA, 29 bp, Homo sapiens
ggactgccaaagcctaccactcccttaaa

SEQ ID NO: 1028 - DNA, 29 bp, Artificial Sequence
  Description of Artificial Sequence: Synthetic oligonucleotide
gcacagcgaaggcgtatcattcgctaaag

SEQ ID NO: 1029 - DNA, 9432 bp, Artificial Sequence
  Description of Artificial Sequence: Synthetic polynucleotide
gtcgacggatcgggagatctcccgatcccctatggtgcactctcagtacaatctgctctgatgccgcatagttaagccagtatctgctccctgcttgtgtgttggaggtcgctgagtagtgcgcgagcaaaatttaagctacaacaaggcaaggcttgaccgacaattgcatgaagaatctgcttagggttaggcgttttgcgctgcttcgcgatgtacgggccagatatcgcgttgacattgattattgactagttattaatagtaatcaattacggggtcattagttcatagcccatatatggagttccgcgttacataacttacggtaaatggcccgcctggctgaccgcccaacgacccccgcccattgacgtcaataatgacgtatgttcccatagtaacgccaatagggactttccattgacgtcaatgggtggagtatttacggtaaactgcccacttggcagtacatcaagtgtatcatatgccaagtacgccccctattgacgtcaatgacggtaaatggcccgcctggcattatgcccagtacatgaccttatgggactttcctacttggcagtacatctacgtattagtcatcgctattaccatggtgatgcggttttggcagtacatcaatgggcgtggatagcggtttgactcacggggatttccaagtctccaccccattgacgtcaatgggagtttgttttggcaccaaaatcaacgggactttccaaaatgtcgtaacaactccgccccattgacgcaaatgggcggtaggcgtgtacggtgggaggtctatataagcagcgcgttttgcctgtactgggtctctctggttagaccagatctgagcctgggagctctctggctaactagggaacccactgcttaagcctcaataaagcttgccttgagtgcttcaagtagtgtgtgcccgtctgttgtgtgactctggtaactagagatccctcagacccttttagtcagtgtggaaaatctctagcagtggcgcccgaacagggacttgaaagcgaaagggaaaccagaggagctctctcgacgcaggactcggcttgctgaagcgcgcacggcaagaggcgaggggcggcgactggtgagtacgccaaaaattttgactagcggaggctagaaggagagagatgggtgcgagagcgtcagtattaagcgggggagaattagatcgcgatgggaaaaaattcggttaaggccagggggaaagaaaaaatataaattaaaacatatagtatgggcaagcagggagctagaacgattcgcagttaatcctggcctgttagaaacatcagaaggctgtagacaaatactgggacagctacaaccatcccttcagacaggatcagaagaacttagatcattatataatacagtagcaaccctctattgtgtgcatcaaaggatagagataaaagacaccaaggaagctttagacaagatagaggaagagcaaaacaaaagtaagaccaccgcacagcaagcggccggccgctgatcttcagacctggaggaggagatatgagggacaattggagaagtgaattatataaatataaagtagtaaaaattgaaccattaggagtagcacccaccaaggcaaagagaagagtggtgcagagagaaaaaagagcagtgggaataggagctttgttccttgggttcttgggagcagcaggaagcactatgggcgcagcgtcaatgacgctgacggtacaggccagacaattattgtctggtatagtgcagcagcagaacaatttgctgagggctattgaggcgcaacagcatctgttgcaactcacagtctggggcatcaagcagctccaggcaagaatcctggctgtggaaagatacctaaaggatcaacagctcctggggatttggggttgctctggaaaactcatttgcaccactgctgtgccttggaatgctagttggagtaataaatctctggaacagatttggaatcacacgacctggatggagtgggacagagaaattaacaattacacaagcttaatacactccttaattgaagaatcgcaaaaccagcaagaaaagaatgaacaagaattattggaattagataaatgggcaagtttgtggaattggtttaacataacaaattggctgtggtatataaaattattcataatgatagtaggaggcttggtaggtttaagaatagtttttgctgtactttctatagtgaatagagttaggcagggatattcaccattatcgtttcagacccacctcccaaccccgaggggacccgacaggcccgaaggaatagaagaagaaggtggagagagagacagagacagatccattcgattagtgaacggatcggcactgcgtgcgccaattctgcagacaaatggcagtattcatccacaattttaaaagaaaaggggggattggggggtacagtgcaggggaaagaatagtagacataatagcaacagacatacaaactaaagaattacaaaaacaaattacaaaaattcaaaattttcgggtttattacagggacagcagagatccagtttggttagtaccgggcccgctctaggaattccccagtggaaagacgcgcaggcaaaacgcaccacgtgacggagcgtgaccgcgcgccgagcgcgcgccaaggtcgggcaggaagagggcctatttcccatgattccttcatatttgcatatacgatacaaggctgttagagagataattagaattaatttgactgtaaacacaaagatattagtacaaaatacgtgacgtagaaagtaataatttcttgggtagtttgcagttttaaaattatgttttaaaatggactatcatatgcttaccgtaacttgaaagtatttcgatttcttgggtttatatatcttgtggaaaggacgcgggatcggttcaagctggacaaagacaatggggtgatcaagagtcaccccattgtctttgtccagcttgaacttttttgaagcttgtcgaccctgtggaatgtgtgtcagttagggtgtggaaagtccccaggctccccagcaggcagaagtatgcaaagcatgccgtacgaccggtcgttacataacttacggtaaatggcccgcctggctgaccgcccaacgacccccgcccattgacgtcaataatgacgtatgttcccatagtaacgccaatagggactttccattgacgtcaatgggtggagtatttacggtaaactgcccacttggcagtacatcaagtgtatcatatgccaagtacgccccctattgacgtcaatgacggtaaatggcccgcctggcattatgcccagtacatgaccttatgggactttcctacttggcagtacatctacgtattagtcatcgctattaccatggtgatgcggttttggcagtacatcaatgggcgtggatagcggtttgactcacggggatttccaagtctccaccccattgacgtcaatgggagtttgttttggcaccaaaatcaacgggactttccaaaatgtcgtaacaactccgccccattgacgcaaatgggcggtaggcgtgtacggtgggaggtctatataagcagagctggtttagtgaaccgtcagatccgctagcttatggccgcggcctcctccccgcccagggccgagaggaagcgctggggttggggccgcctgccaggcgcccggcggggcagcgcgggcctggccaagaagtgccccttctcgctggagctggcggagggcggcccggcgggcggcgcgctctacgcgcccatcgcgcccggcgccccaggtcccgcgccccctgcgtccccggccgcgcccgccgcgcccccagttgcctccgaccttggcccgcggccgccggtgagcctagacccgcgcgtctccatctacagcacgcgccgcccggtgttggcgcgcacccacgtccagggccgcgtctacaacttcctcgagcgtcccaccggctggaaatgcttcgtttaccacttcgccgtcttcctcatcgtcctggtctgcctcatcttcagcgtgctgtccaccatcgagcagtatgccgccctggccacggggactctcttctggatggagatcgtgctggtggtgttcttcgggacggagtacgtggtccgcctctggtccgccggctgccgcagcaagtacgtgggcctctgggggcggctgcgctttgcccggaagcccatttccatcatcgacctcatcgtggtcgtggcctccatggtggtcctctgcgtgggctccaaggggcaggtgtttgccacgtcggccatcaggggcatccgcttcctgcagatcctgaggatgctacacgtcgaccgccagggaggcacctggaggctcctgggctccgtggtcttcatccaccgccaggagctgataaccaccctgtacatcggcttcctgggcctcatcttctcctcgtactttgtgtacctggctgagaaggacgcggtgaacgagtcaggccgcgtggagttcggcagctacgcagatgcgctgtggtggggggtggtcacagtcaccaccatcggctatggggacaaggtgccccagacgtgggtcgggaagaccatcgcctcctgcttctctgtctttgccatctccttctttgcgctcccagcggggattcttggctcggggtttgccctgaaggtgcagcagaagcagaggcagaagcacttcaaccggcagatcccggcggcagcctcactcattcagaccgcatggaggtgctatgctgccgagaaccccgactcctccacctggaagatctacatccggaaggccccccggagccacactctgctgtcacccagccccaaacccaagaagtctgtggtggtaaagaaaaaaaaatttaaactcgataaggataacggcgtcactcctggagagaagatgctcacagtcccccatatcacgtgcgaccccccagaagagcggcggctggaccacttctctgtcgacggctatgacagttctgtaaggaagagcccaacactgctggaagtgagcatgccccatttcatgagaaccaacagcttcgccgaggacctggacctggaaggggagactctgctgacacccatcacccacatctcacagctgcgggaacaccatcgggccaccattaaggtcattcgacgcatgcagtactttgtggccaagaagaaattccagcaagcgcggaagccttacgatgtgcgggacgtcattgagcagtactcgcagggccacctcaacctcatggtgcgcatcaaggagctgcagaggaggctggaccagtccattgggaagccctcactgttcatctccgtctcagaaaagagcaaggatcgcggcagcaacacgatcggcgcccgcctgaaccgagtagaagacaaggtgacgcagctggaccagaggctggcactcatcaccgacatgcttcaccagctgctctccttgcacggtggcagcacccccggcagcggcggcccccccagagagggcggggcccacatcacccagccctgcggcagtggcggctccgtcgaccctgagctcttcctgcccagcaacaccctgcccacctacgagcagctgaccgtgcccaggaggggccccgatgaggggtccggaagcggagctactaacttcagcctgctgaagcaggctggcgacgtggaggagaaccctggacctacgcgttctagactcgagatggagagcgacgagagcggcctgcccgccatggagatcgagtgccgcatcaccggcaccctgaacggcgtggagttcgagctggtgggcggcggagagggcacccccgagcagggccgcatgaccaacaagatgaagagcaccaaaggcgccctgaccttcagcccctacctgctgagccacgtgatgggctacggcttctaccacttcggcacctaccccagcggctacgagaaccccttcctgcacgccatcaacaacggcggctacaccaacacccgcatcgagaagtacgaggacggcggcgtgctgcacgtgagcttcagctaccgctacgaggccggccgcgtgatcggcgacttcaaggtgatgggcaccggcttccccgaggacagcgtgatcttcaccgacaagatcatccgcagcaacgccaccgtggagcacctgcaccccatgggcgataacgatctggatggcagcttcacccgcaccttcagcctgcgcgacggcggctactacagctccgtggtggacagccacatgcacttcaagagcgccatccaccccagcatcctgcagaacgggggccccatgttcgccttccgccgcgtggaggaggatcacagcaacaccgagctgggcatcgtggagtaccagcacgccttcaagaccccggatgcagatgccggtgaagaaagagtttaaacggccggccgcggtctgtacaagtaggattcgtcgagggacctaataacttcgtatagcatacattatacgaagttatacatgtttaagggttccggttccactaggtacaattcgatatcaagcttatcgataatcaacctctggattacaaaatttgtgaaagattgactggtattcttaactatgttgctccttttacgctatgtggatacgctgctttaatgcctttgtatcatgctattgcttcccgtatggctttcattttctcctccttgtataaatcctggttgctgtctctttatgaggagttgtggcccgttgtcaggcaacgtggcgtggtgtgcactgtgtttgctgacgcaacccccactggttggggcattgccaccacctgtcagctcctttccgggactttcgctttccccctccctattgccacggcggaactcatcgccgcctgccttgcccgctgctggacaggggctcggctgttgggcactgacaattccgtggtgttgtcggggaaatcatcgtcctttccttggctgctcgcctgtgttgccacctggattctgcgcgggacgtccttctgctacgtcccttcggccctcaatccagcggaccttccttcccgcggcctgctgccggctctgcggcctcttccgcgtcttcgccttcgccctcagacgagtcggatctccctttgggccgcctccccgcatcgataccgtcgacctcgatcgagacctagaaaaacatggagcaatcacaagtagcaatacagcagctaccaatgctgattgtgcctggctagaagcacaagaggaggaggaggtgggttttccagtcacacctcaggtacctttaagaccaatgacttacaaggcagctgtagatcttagccactttttaaaagaaaaggggggactggaagggctaattcactcccaacgaagacaagatatccttgatctgtggatctaccacacacaaggctacttccctgattggcagaactacacaccagggccagggatcagatatccactgacctttggatggtgctacaagctagtaccagttgagcaagagaaggtagaagaagccaatgaaggagagaacacccgcttgttacaccctgtgagcctgcatgggatggatgacccggagagagaagtattagagtggaggtttgacagccgcctagcatttcatcacatggcccgagagctgcatccggactgtactgggtctctctggttagaccagatctgagcctgggagctctctggctaactagggaacccactgcttaagcctcaataaagcttgccttgagtgcttcaagtagtgtgtgcccgtctgttgtgtgactctggtaactagagatccctcagacccttttagtcagtgtggaaaatctctagcagcatgtgagcaaaaggccagcaaaaggccaggaaccgtaaaaaggccgcgttgctggcgtttttccataggctccgcccccctgacgagcatcacaaaaatcgacgctcaagtcagaggtggcgaaacccgacaggactataaagataccaggcgtttccccctggaagctccctcgtgcgctctcctgttccgaccctgccgcttaccggatacctgtccgcctttctcccttcgggaagcgtggcgctttctcatagctcacgctgtaggtatctcagttcggtgtaggtcgttcgctccaagctgggctgtgtgcacgaaccccccgttcagcccgaccgctgcgccttatccggtaactatcgtcttgagtccaacccggtaagacacgacttatcgccactggcagcagccactggtaacaggattagcagagcgaggtatgtaggcggtgctacagagttcttgaagtggtggcctaactacggctacactagaagaacagtatttggtatctgcgctctgctgaagccagttaccttcggaaaaagagttggtagctcttgatccggcaaacaaaccaccgctggtagcggtggtttttttgtttgcaagcagcagattacgcgcagaaaaaaaggatctcaagaagatcctttgatcttttctacggggtctgacgctcagtggaacgaaaactcacgttaagggattttggtcatgattacgccccgccctgccactcatcgcagtactgttgtaattcattaagcattctgccgacatggaagccatcacaaacggcatgatgaacctgaatcgccagcggcatcagcaccttgtcgccttgcgtataatatttgcccatggtgaaaacgggggcgaagaagttgtccatattggccacgtttaaatcaaaactggtgaaactcacccagggattggctgaaacgaaaaacatattctcaataaaccctttagggaaataggccaggttttcaccgtaacacgccacatcttgcgaatatatgtgtagaaactgccggaaatcgtcgtggtattcactccagagcgatgaaaacgtttcagtttgctcatggaaaacggtgtaacaagggtgaacactatcccatatcaccagctcaccgtctttcattgccatacggaactccggatgagcattcatcaggcgggcaagaatgtgaataaaggccggataaaacttgtgcttatttttctttacggtctttaaaaaggccgtaatatccagctgaacggtctggttataggtacattgagcaactgactgaaatgcctcaaaatgttctttacgatgccattgggatatatcaacggtggtatatccagtgatttttttctccatactcttcctttttcaatattattgaagcatttatcagggttattgtctcatgagcggatacatatttgaatgtatttagaaaaataaacaaataggggttccgcgcacatttccccgaaaagtgccacctgac

SEQ ID NO: 1030 - DNA, 2031 bp, Homo sapiens
atggccgcggcctcctccccgcccagggccgagaggaagcgctggggttggggccgcctgccaggcgcccggcggggcagcgcgggcctggccaagaagtgccccttctcgctggagctggcggagggcggcccggcgggcggcgcgctctacgcgcccatcgcgcccggcgccccaggtcccgcgccccctgcgtccccggccgcgcccgccgcgcccccagttgcctccgaccttggcccgcggccgccggtgagcctagacccgcgcgtctccatctacagcacgcgccgcccggtgttggcgcgcacccacgtccagggccgcgtctacaacttcctcgagcgtcccaccggctggaaatgcttcgtttaccacttcgccgtcttcctcatcgtcctggtctgcctcatcttcagcgtgctgtccaccatcgagcagtatgccgccctggccacggggactctcttctggatggagatcgtgctggtggtgttcttcgggacggagtacgtggtccgcctctggtccgccggctgccgcagcaagtacgtgggcctctgggggcggctgcgctttgcccggaagcccatttccatcatcgacctcatcgtggtcgtggcctccatggtggtcctctgcgtgggctccaaggggcaggtgtttgccacgtcggccatcaggggcatccgcttcctgcagatcctgaggatgctacacgtcgaccgccagggaggcacctggaggctcctgggctccgtggtcttcatccaccgccaggagctgataaccaccctgtacatcggcttcctgggcctcatcttctcctcgtactttgtgtacctggctgagaaggacgcggtgaacgagtcaggccgcgtggagttcggcagctacgcagatgcgctgtggtggggggtggtcacagtcaccaccatcggctatggggacaaggtgccccagacgtgggtcgggaagaccatcgcctcctgcttctctgtctttgccatctccttctttgcgctcccagcggggattcttggctcggggtttgccctgaaggtgcagcagaagcagaggcagaagcacttcaaccggcagatcccggcggcagcctcactcattcagaccgcatggaggtgctatgctgccgagaaccccgactcctccacctggaagatctacatccggaaggccccccggagccacactctgctgtcacccagccccaaacccaagaagtctgtggtggtaaagaaaaaaaagttcaagctggacaaagacaatggggtgactcctggagagaagatgctcacagtcccccatatcacgtgcgaccccccagaagagcggcggctggaccacttctctgtcgacggctatgacagttctgtaaggaagagcccaacactgctggaagtgagcatgccccatttcatgagaaccaacagcttcgccgaggacctggacctggaaggggagactctgctgacacccatcacccacatctcacagctgcgggaacaccatcgggccaccattaaggtcattcgacgcatgcagtactttgtggccaagaagaaattccagcaagcgcggaagccttacgatgtgcgggacgtcattgagcagtactcgcagggccacctcaacctcatggtgcgcatcaaggagctgcagaggaggctggaccagtccattgggaagccctcactgttcatctccgtctcagaaaagagcaaggatcgcggcagcaacacgatcggcgcccgcctgaaccgagtagaagacaaggtgacgcagctggaccagaggctggcactcatcaccgacatgcttcaccagctgctctccttgcacggtggcagcacccccggcagcggcggcccccccagagagggcggggcccacatcacccagccctgcggcagtggcggctccgtcgaccctgagctcttcctgcccagcaacaccctgcccacctacgagcagctgaccgtgcccaggaggggccccgatgaggggtcctga

SEQ ID NO: 1031 - DNA, 2031 bp, Artificial Sequence
  Description of Artificial Sequence: Synthetic polynucleotide
atggccgcggcctcctccccgcccagggccgagaggaagcgctggggttggggccgcctgccaggcgcccggcggggcagcgcgggcctggccaagaagtgccccttctcgctggagctggcggagggcggcccggcgggcggcgcgctctacgcgcccatcgcgcccggcgccccaggtcccgcgccccctgcgtccccggccgcgcccgccgcgcccccagttgcctccgaccttggcccgcggccgccggtgagcctagacccgcgcgtctccatctacagcacgcgccgcccggtgttggcgcgcacccacgtccagggccgcgtctacaacttcctcgagcgtcccaccggctggaaatgcttcgtttaccacttcgccgtcttcctcatcgtcctggtctgcctcatcttcagcgtgctgtccaccatcgagcagtatgccgccctggccacggggactctcttctggatggagatcgtgctggtggtgttcttcgggacggagtacgtggtccgcctctggtccgccggctgccgcagcaagtacgtgggcctctgggggcggctgcgctttgcccggaagcccatttccatcatcgacctcatcgtggtcgtggcctccatggtggtcctctgcgtgggctccaaggggcaggtgtttgccacgtcggccatcaggggcatccgcttcctgcagatcctgaggatgctacacgtcgaccgccagggaggcacctggaggctcctgggctccgtggtcttcatccaccgccaggagctgataaccaccctgtacatcggcttcctgggcctcatcttctcctcgtactttgtgtacctggctgagaaggacgcggtgaacgagtcaggccgcgtggagttcggcagctacgcagatgcgctgtggtggggggtggtcacagtcaccaccatcggctatggggacaaggtgccccagacgtgggtcgggaagaccatcgcctcctgcttctctgtctttgccatctccttctttgcgctcccagcggggattcttggctcggggtttgccctgaaggtgcagcagaagcagaggcagaagcacttcaaccggcagatcccggcggcagcctcactcattcagaccgcatggaggtgctatgctgccgagaaccccgactcctccacctggaagatctacatccggaaggccccccggagccacactctgctgtcacccagccccaaacccaagaagtctgtggtggtaaagaaaaaaaaatttaaactcgataaggataacggcgtcactcctggagagaagatgctcacagtcccccatatcacgtgcgaccccccagaagagcggcggctggaccacttctctgtcgacggctatgacagttctgtaaggaagagcccaacactgctggaagtgagcatgccccatttcatgagaaccaacagcttcgccgaggacctggacctggaaggggagactctgctgacacccatcacccacatctcacagctgcgggaacaccatcgggccaccattaaggtcattcgacgcatgcagtactttgtggccaagaagaaattccagcaagcgcggaagccttacgatgtgcgggacgtcattgagcagtactcgcagggccacctcaacctcatggtgcgcatcaaggagctgcagaggaggctggaccagtccattgggaagccctcactgttcatctccgtctcagaaaagagcaaggatcgcggcagcaacacgatcggcgcccgcctgaaccgagtagaagacaaggtgacgcagctggaccagaggctggcactcatcaccgacatgcttcaccagctgctctccttgcacggtggcagcacccccggcagcggcggcccccccagagagggcggggcccacatcacccagccctgcggcagtggcggctccgtcgaccctgagctcttcctgcccagcaacaccctgcccacctacgagcagctgaccgtgcccaggaggggccccgatgaggggtcctga

SEQ ID NO: 1032 - protein, 676 aa, Homo sapiens [sequence omitted]

SEQ ID NO: 1033 - DNA, 8713 bp, Artificial Sequence
  Description of Artificial Sequence: Synthetic polynucleotide
cctgcaggcagctgcgcgctcgctcgctcactgaggccgcccgggcaaagcccgggcgtcgggcgacctttggtcgcccggcctcagtgagcgagcgagcgcgcagagagggagtggccaactccatcactaggggttcctgcggccgcaaccgtctagaattccccagtggaaagacgcgcaggcaaaacgcaccacgtgacggagcgtgaccgcgcgccgagcgcgcgccaaggtcgggcaggaagagggcctatttcccatgattccttcatatttgcatatacgatacaaggctgttagagagataattagaattaatttgactgtaaacacaaagatattagtacaaaatacgtgacgtagaaagtaataatttcttgggtagtttgcagttttaaaattatgttttaaaatggactatcatatgcttaccgtaacttgaaagtatttcgatttcttgggtttatatatcttgtggaaaggacgcgggatcgcacggagcagccaggggaggtgtcggccttcaagagaggccgacacctcccctggctgctccgtgttttttgaagcttcgtacgaccggtcgttacataacttacggtaaatggcccgcctggctgaccgcccaacgacccccgcccattgacgtcaataatgacgtatgttcccatagtaacgccaatagggactttccattgacgtcaatgggtggagtatttacggtaaactgcccacttggcagtacatcaagtgtatcatatgccaagtacgccccctattgacgtcaatgacggtaaatggcccgcctggcattatgcccagtacatgaccttatgggactttcctacttggcagtacatctacgtattagtcatcgctattaccatggtgatgcggttttggcagtacatcaatgggcgtggatagcggtttgactcacggggatttccaagtctccaccccattgacgtcaatgggagtttgttttggcaccaaaatcaacgggactttccaaaatgtcgtaacaactccgccccattgacgcaaatgggcggtaggcgtgtacggtgggaggtctatataagcagagctggtttagtgaaccgtcagatccgctagcgctaccggactcagatctcgagctcaagcttcgaattcgcccttttggatccatgccggtgcggaggggccacgtcgcgccgcagaacaccttcctggacaccatcatccgcaagtttgagggccagagccgtaagttcatcatcgccaacgctcgggtggagaactgcgccgtcatctactgcaacgacggcttctgcgagctgtgcggctactcgcgggccgaggtgatgcagcgaccctgcacctgcgacttcctgcacgggccgcgcacgcagcgccgcgctgccgcgcagatcgcgcaggcactgctgggcgccgaggagcgcaaagtggaaatcgccttctaccggaaagatgggagctgcttcctatgtctggtggatgtggtgcccgtgaagaacgaggatggggctgtcatcatgttcatcctcaatttcgaggtggtgatggagaaggacatggtggggtccccggctcatgacaccaaccaccggggcccccccaccagctggctggccccaggccgcgccaagaccttccgcctgaagctgcccgcgctgctggcgctgacggcccgggagtcgtcggtgcggtcgggcggcgcgggcggcgcgggcgccccgggggccgtggtggtggacgtggacctgacgcccgcggcacccagcagcgagtcgctggccctggacgaagtgacagccatggacaaccacgtggcagggctcgggcccgcggaggagcggcgtgcgctggtgggtcccggctctccgccccgcagcgcgcccggccagctcccatcgccccgggcgcacagcctcaaccccgacgcctcgggctccagctgcagcctggcccggacgcgctcccgagaaagctgcgccagcgtgcgccgcgcctcgtcggccgacgacatcgaggccatgcgcgccggggtgctgcccccgccaccgcgccacgccagcaccggggccatgcacccactgcgcagcggcttgctcaactccacctcggactccgacctcgtgcgctaccgcaccattagcaagattccccaaatcaccctcaactttgtggacctcaagggcgaccccttcttggcttcgcccaccagtgaccgtgagatcatagcacctaagataaaggagcgaacccacaatgtcactgagaaggtcacccaggtcctgtccctgggcgccgacgtgctgcctgagtacaagctgcaggcaccgcgcatccaccgctggaccatcctgcattacagccccttcaaggccgtgtgggactggctcatcctgctgctggtcatctacacggctgtcttcacaccctactcggctgccttcctgctgaaggagacggaagaaggcccgcctgctaccgagtgtggctacgcctgccagccgctggctgtggtggacctcatcgtggacatcatgttcattgtggacatcctcatcaacttccgcaccacctacgtcaatgccaacgaggaggtggtcagccaccccggccgcatcgccgtccactacttcaagggctggttcctcatcgacatggtggccgccatccccttcgacctgctcatcttcggctctggctctgaggagctgatcgggctgctgaagactgcgcggctgctgcggctggtgcgcgtggcgcggaagctggatcgctactcagagtacggcgcggccgtgctgttcttgctcatgtgcacctttgcgctcatcgcgcactggctagcctgcatctggtacgccatcggcaacatggagcagccacacatggactcacgcatcggctggctgcacaacctgggcgaccagataggcaaaccctacaacagcagcggcctgggcggcccctccatcaaggacaagtatgtgacggcgctctacttcaccttcagcagcctcaccagtgtgggcttcggcaacgtctctcccaacaccaactcagagaagatcttctccatctgcgtcatgctcattggctccctcatgtatgctagcatcttcggcaacgtgtcggccatcatccagcggctgtactcgggcacagcccgctaccacacacagatgctgcgggtgcgggagttcatccgcttccaccagatccccaatcccctgcgccagcgcctcgaggagtacttccagcacgcctggtcctacaccaacggcatcgacatgaacgcggtgctgaagggcttccctgagtgcctgcaggctgacatctgcctgcacctgaaccgctcactgctgcagcactgcaaacccttccgaggggccaccaagggctgccttcgggccctggccatgaagttcaagaccacacatgcaccgccaggggacacactggtgcatgctggggacctgctcaccgccctgtacttcatctcccggggctccatcgagatcctgcggggcgacgtcgtcgtggccatcctggggaagaatgacatctttggggagcctctgaacctgtatgcaaggcctggcaagtcgaacggggatgtgcgggccctcacctactgtgacctacacaagatccatcgggacgacctgctggaggtgctggacatgtaccctgagttctccgaccacttctggtccagcctggagatcaccttcaacctgcgagataccaacatgatcccgggctcccccggcagtacggagttagagggtggcttcagtcggcaacgcaagcgcaagttgtccttccgcaggcgcacggacaaggataccgaacaacctggcgaagtctccgcgttggggccgggccgggcgggggcagggccgagtagccggggccggccgggggggccgtggggggagagcccgtccagtggcccctccagccctgagagcagtgaggatgagggcccaggccgcagctccagccccctccgcctggtgcccttctccagccccaggccccccggagagccgccgggtggggagcccctgatggaggactgcgagaagagcagcgacacttgcaaccccctgtcaggcgccttctcaggagtgtccaacattttcagcttctggggggacagtcggggccgccagtaccaggagctccctcgatgccccgcccccacccccagcctcctcaacatccccctctccagcccgggtcggcggccccggggcgacgtggagagcaggctggatgccctccagcgccagctcaacaggctggagacccggctgagtgcagacatggccactgtcctgcagctgctacagaggcagatgacgctggtcccgcccgcctacagtgctgtgaccaccccggggcctggccccacttccacatccccgctgttgcccgtcagccccctccccaccctcaccttggactcgctttctcaggtttcccagttcatggcgtgtgaggagctgcccccgggggccccagagcttccccaagaaggccccacacgacgcctctccctaccgggccagctgggggccctcacctcccagcccctgcacagacacggctcggacccgggcagtggaagcggagctactaacttcagcctgctgaagcaggctggcgacgtggaggagaaccctggacctacgcgtactagtctcgagatggagagcgacgagagcggcctgcccgccatggagatcgagtgccgcatcaccggcaccctgaacggcgtggagttcgagctggtgggcggcggagagggcacccccgagcagggccgcatgaccaacaagatgaagagcaccaaaggcgccctgaccttcagcccctacctgctgagccacgtgatgggctacggcttctaccacttcggcacctaccccagcggctacgagaaccccttcctgcacgccatcaacaacggcggctacaccaacacccgcatcgagaagtacgaggacggcggcgtgctgcacgtgagcttcagctaccgctacgaggccggccgcgtgatcggcgacttcaaggtgatgggcaccggcttccccgaggacagcgtgatcttcaccgacaagatcatccgcagcaacgccaccgtggagcacctgcaccccatgggcgataacgatctggatggcagcttcacccgcaccttcagcctgcgcgacggcggctactacagctccgtggtggacagccacatgcacttcaagagcgccatccaccccagcatcctgcagaacgggggccccatgttcgccttccgccgcgtggaggaggatcacagcaacaccgagctgggcatcgtggagtaccagcacgccttcaagaccccggatgcagatgccggtgaagaaagagtttaaacggccggccagatctacgggtggcatccctgtgacccctccccagtgcctctcctggccctggaagttgccactccagtgcccaccagccttgtcctaataaaattaagttgcatcattttgtctgactaggtgtccttctataatattatggggtggaggggggtggtatggagcaaggggcaagttgggaagacaacctgtagggcctgcggggtctattgggaaccaagctggagtgcagtggcacaatcttggctcactgcaatctccgcctcctgggttcaagcgattctcctgcctcagcctcccgagttgttgggattccaggcatgcatgaccaggctcagctaatttttgtttttttggtagagacggggtttcaccatattggccaggctggtctccaactcctaatctcaggtgatctacccaccttggcctcccaaattgctgggattacaggcgtgaaccactgctcccttccctgtccttctgattttgtaggtaaccacgtgcggaccgagcggccgcaggaacccctagtgatggagttggccactccctctctgcgcgctcgctcgctcactgaggccgggcgaccaaaggtcgcccgacgcccgggctttgcccgggcggcctcagtgagcgagcgagcgcgcagctgcctgcaggggcgcctgatgcggtattttctccttacgcatctgtgcggtatttcacaccgcatacgtcaaagcaaccatagtacgcgccctgtagcggcgcattaagcgcggcgggtgtggtggttacgcgcagcgtgaccgctacacttgccagcgccctagcgcccgctcctttcgctttcttcccttcctttctcgccacgttcgccggctttccccgtcaagctctaaatcgggggctccctttagggttccgatttagtgctttacggcacctcgaccccaaaaaacttgatttgggtgatggttcacgtagtgggccatcgccctgatagacggtttttcgccctttgacgttggagtccacgttctttaatagtggactcttgttccaaactggaacaacactcaactctatctcgggctattcttttgatttataagggattttgccgatttcggtctattggttaaaaaatgagctgatttaacaaaaatttaacgcgaattttaacaaaatattaacgtttacaattttatggtgcactctcagtacaatctgctctgatgccgcatagttaagccagccccgacacccgccaacacccgctgacgcgccctgacgggcttgtctgctcccggcatccgcttacagacaagctgtgaccgtctccgggagctgcatgtgtcagaggttttcaccgtcatcaccgaaacgcgcgagacgaaagggcctcgtgatacgcctatttttataggttaatgtcatgataataatggtttcttagacgtcaggtggcacttttcggggaaatgtgcgcggaacccctatttgtttatttttctaaatacattcaaatatgtatccgctcatgagacaataaccctgataaatgcttcaataatattgaaaaaggaagagtatgagtattcaacatttccgtgtcgcccttattcccttttttgcggcattttgccttcctgtttttgctcacccagaaacgctggtgaaagtaaaagatgctgaagatcagttgggtgcacgagtgggttacatcgaactggatctcaacagcggtaagatccttgagagttttcgccccgaagaacgttttccaatgatgagcacttttaaagttctgctatgtggcgcggtattatcccgtattgacgccgggcaagagcaactcggtcgccgcatacactattctcagaatgacttggttgagtactcaccagtcacagaaaagcatcttacggatggcatgacagtaagagaattatgcagtgctgccataaccatgagtgataacactgcggccaacttacttctgacaacgatcggaggaccgaaggagctaaccgcttttttgcacaacatgggggatcatgtaactcgccttgatcgttgggaaccggagctgaatgaagccataccaaacgacgagcgtgacaccacgatgcctgtagcaatggcaacaacgttgcgcaaactattaactggcgaactacttactctagcttcccggcaacaattaatagactggatggaggcggataaagttgcaggaccacttctgcgctcggcccttccggctggctggtttattgctgataaatctggagccggtgagcgtgggtctcgcggtatcattgcagcactggggccagatggtaagccctcccgtatcgtagttatctacacgacggggagtcaggcaactatggatgaacgaaatagacagatcgctgagataggtgcctcactgattaagcattggtaactgtcagaccaagtttactcatatatactttagattgatttaaaacttcatttttaatttaaaaggatctaggtgaagatcctttttgataatctcatgaccaaaatcccttaacgtgagttttcgttccactgagcgtcagaccccgtagaaaagatcaaaggatcttcttgagatcctttttttctgcgcgtaatctgctgcttgcaaacaaaaaaaccaccgctaccagcggtggtttgtttgccggatcaagagctaccaactctttttccgaaggtaactggcttcagcagagcgcagataccaaatactgttcttctagtgtagccgtagttaggccaccacttcaagaactctgtagcaccgcctacatacctcgctctgctaatcctgttaccagtggctgctgccagtggcgataagtcgtgtcttaccgggttggactcaagacgatagttaccggataaggcgcagcggtcgggctgaacggggggttcgtgcacacagcccagcttggagcgaacgacctacaccgaactgagatacctacagcgtgagctatgagaaagcgccacgcttcccgaagggagaaaggcggacaggtatccggtaagcggcagggtcggaacaggagagcgcacgagggagcttccagggggaaacgcctggtatctttatagtcctgtcgggtttcgccacctctgacttgagcgtcgatttttgtgatgctcgtcaggggggcggagcctatggaaaaacgccagcaacgcggcctttttacggttcctggccttttgctggccttttgctcacatgt

SEQ ID NO: 1034 - DNA, 3480 bp, Homo sapiens
atgccggtgcggaggggccacgtcgcgccgcagaacaccttcctggacaccatcatccgcaagtttgagggccagagccgtaagttcatcatcgccaacgctcgggtggagaactgcgccgtcatctactgcaacgacggcttctgcgagctgtgcggctactcgcgggccgaggtgatgcagcgaccctgcacctgcgacttcctgcacgggccgcgcacgcagcgccgcgctgccgcgcagatcgcgcaggcactgctgggcgccgaggagcgcaaagtggaaatcgccttctaccggaaagatgggagctgcttcctatgtctggtggatgtggtgcccgtgaagaacgaggatggggctgtcatcatgttcatcctcaatttcgaggtggtgatggagaaggacatggtggggtccccggctcatgacaccaaccaccggggcccccccaccagctggctggccccaggccgcgccaagaccttccgcctgaagctgcccgcgctgctggcgctgacggcccgggagtcgtcggtgcggtcgggcggcgcgggcggcgcgggcgccccgggggccgtggtggtggacgtggacctgacgcccgcggcacccagcagcgagtcgctggccctggacgaagtgacagccatggacaaccacgtggcagggctcgggcccgcggaggagcggcgtgcgctggtgggtcccggctctccgccccgcagcgcgcccggccagctcccatcgccccgggcgcacagcctcaaccccgacgcctcgggctccagctgcagcctggcccggacgcgctcccgagaaagctgcgccagcgtgcgccgcgcctcgtcggccgacgacatcgaggccatgcgcgccggggtgctgcccccgccaccgcgccacgccagcaccggggccatgcacccactgcgcagcggcttgctcaactccacctcggactccgacctcgtgcgctaccgcaccattagcaagattccccaaatcaccctcaactttgtggacctcaagggcgaccccttcttggcttcgcccaccagtgaccgtgagatcatagcacctaagataaaggagcgaacccacaatgtcactgagaaggtcacccaggtcctgtccctgggcgccgacgtgctgcctgagtacaagctgcaggcaccgcgcatccaccgctggaccatcctgcattacagccccttcaaggccgtgtgggactggctcatcctgctgctggtcatctacacggctgtcttcacaccctactcggctgccttcctgctgaaggagacggaagaaggcccgcctgctaccgagtgtggctacgcctgccagccgctggctgtggtggacctcatcgtggacatcatgttcattgtggacatcctcatcaacttccgcaccacctacgtcaatgccaacgaggaggtggtcagccaccccggccgcatcgccgtccactacttcaagggctggttcctcatcgacatggtggccgccatccccttcgacctgctcatcttcggctctggctctgaggagctgatcgggctgctgaagactgcgcggctgctgcggctggtgcgcgtggcgcggaagctggatcgctactcagagtacggcgcggccgtgctgttcttgctcatgtgcacctttgcgctcatcgcgcactggctagcctgcatctggtacgccatcggcaacatggagcagccacacatggactcacgcatcggctggctgcacaacctgggcgaccagataggcaaaccctacaacagcagcggcctgggcggcccctccatcaaggacaagtatgtgacggcgctctacttcaccttcagcagcctcaccagtgtgggcttcggcaacgtctctcccaacaccaactcagagaagatcttctccatctgcgtcatgctcattggctccctcatgtatgctagcatcttcggcaacgtgtcggccatcatccagcggctgtactcgggcacagcccgctaccacacacagatgctgcgggtgcgggagttcatccgcttccaccagatccccaatcccctgcgccagcgcctcgaggagtacttccagcacgcctggtcctacaccaacggcatcgacatgaacgcggtgctgaagggcttccctgagtgcctgcaggctgacatctgcctgcacctgaaccgctcactgctgcagcactgcaaacccttccgaggggccaccaagggctgccttcgggccctggccatgaagttcaagaccacacatgcaccgccaggggacacactggtgcatgctggggacctgctcaccgccctgtacttcatctcccggggctccatcgagatcctgcggggcgacgtcgtcgtggccatcctggggaagaatgacatctttggggagcctctgaacctgtatgcaaggcctggcaagtcgaacggggatgtgcgggccctcacctactgtgacctacacaagatccatcgggacgacctgctggaggtgctggacatgtaccctgagttctccgaccacttctggtccagcctggagatcaccttcaacctgcgagataccaacatgatcccgggctcccccggcagtacggagttagagggtggcttcagtcggcaacgcaagcgcaagttgtccttccgcaggcgcacggacaaggacacggagcagccaggggaggtgtcggccttggggccgggccgggcgggggcagggccgagtagccggggccggccgggggggccgtggggggagagcccgtccagtggcccctccagccctgagagcagtgaggatgagggcccaggccgcagctccagccccctccgcctggtgcccttctccagccccaggccccccggagagccgccgggtggggagcccctgatggaggactgcgagaagagcagcgacacttgcaaccccctgtcaggcgccttctcaggagtgtccaacattttcagcttctggggggacagtcggggccgccagtaccaggagctccctcgatgccccgcccccacccccagcctcctcaacatccccctctccagcccgggtcggcggccccggggcgacgtggagagcaggctggatgccctccagcgccagctcaacaggctggagacccggctgagtgcagacatggccactgtcctgcagctgctacagaggcagatgacgctggtcccgcccgcctacagtgctgtgaccaccccggggcctggccccacttccacatccccgctgttgcccgtcagccccctccccaccctcaccttggactcgctttctcaggtttcccagttcatggcgtgtgaggagctgcccccgggggccccagagcttccccaagaaggccccacacgacgcctctccctaccgggccagctgggggccctcacctcccagcccctgcacagacacggctcggacccgggcagttag

SEQ ID NO: 1035 - DNA, 3480 bp, Artificial Sequence
  Description of Artificial Sequence: Synthetic polynucleotide
atgccggtgcggaggggccacgtcgcgccgcagaacaccttcctggacaccatcatccgcaagtttgagggccagagccgtaagttcatcatcgccaacgctcgggtggagaactgcgccgtcatctactgcaacgacggcttctgcgagctgtgcggctactcgcgggccgaggtgatgcagcgaccctgcacctgcgacttcctgcacgggccgcgcacgcagcgccgcgctgccgcgcagatcgcgcaggcactgctgggcgccgaggagcgcaaagtggaaatcgccttctaccggaaagatgggagctgcttcctatgtctggtggatgtggtgcccgtgaagaacgaggatggggctgtcatcatgttcatcctcaatttcgaggtggtgatggagaaggacatggtggggtccccggctcatgacaccaaccaccggggcccccccaccagctggctggccccaggccgcgccaagaccttccgcctgaagctgcccgcgctgctggcgctgacggcccgggagtcgtcggtgcggtcgggcggcgcgggcggcgcgggcgccccgggggccgtggtggtggacgtggacctgacgcccgcggcacccagcagcgagtcgctggccctggacgaagtgacagccatggacaaccacgtggcagggctcgggcccgcggaggagcggcgtgcgctggtgggtcccggctctccgccccgcagcgcgcccggccagctcccatcgccccgggcgcacagcctcaaccccgacgcctcgggctccagctgcagcctggcccggacgcgctcccgagaaagctgcgccagcgtgcgccgcgcctcgtcggccgacgacatcgaggccatgcgcgccggggtgctgcccccgccaccgcgccacgccagcaccggggccatgcacccactgcgcagcggcttgctcaactccacctcggactccgacctcgtgcgctaccgcaccattagcaagattccccaaatcaccctcaactttgtggacctcaagggcgaccccttcttggcttcgcccaccagtgaccgtgagatcatagcacctaagataaaggagcgaacccacaatgtcactgagaaggtcacccaggtcctgtccctgggcgccgacgtgctgcctgagtacaagctgcaggcaccgcgcatccaccgctggaccatcctgcattacagccccttcaaggccgtgtgggactggctcatcctgctgctggtcatctacacggctgtcttcacaccctactcggctgccttcctgctgaaggagacggaagaaggcccgcctgctaccgagtgtggctacgcctgccagccgctggctgtggtggacctcatcgtggacatcatgttcattgtggacatcctcatcaacttccgcaccacctacgtcaatgccaacgaggaggtggtcagccaccccggccgcatcgccgtccactacttcaagggctggttcctcatcgacatggtggccgccatccccttcgacctgctcatcttcggctctggctctgaggagctgatcgggctgctgaagactgcgcggctgctgcggctggtgcgcgtggcgcggaagctggatcgctactcagagtacggcgcggccgtgctgttcttgctcatgtgcacctttgcgctcatcgcgcactggctagcctgcatctggtacgccatcggcaacatggagcagccacacatggactcacgcatcggctggctgcacaacctgggcgaccagataggcaaaccctacaacagcagcggcctgggcggcccctccatcaaggacaagtatgtgacggcgctctacttcaccttcagcagcctcaccagtgtgggcttcggcaacgtctctcccaacaccaactcagagaagatcttctccatctgcgtcatgctcattggctccctcatgtatgctagcatcttcggcaacgtgtcggccatcatccagcggctgtactcgggcacagcccgctaccacacacagatgctgcgggtgcgggagttcatccgcttccaccagatccccaatcccctgcgccagcgcctcgaggagtacttccagcacgcctggtcctacaccaacggcatcgacatgaacgcggtgctgaagggcttccctgagtgcctgcaggctgacatctgcctgcacctgaaccgctcactgctgcagcactgcaaacccttccgaggggccaccaagggctgccttcgggccctggccatgaagttcaagaccacacatgcaccgccaggggacacactggtgcatgctggggacctgctcaccgccctgtacttcatctcccggggctccatcgagatcctgcggggcgacgtcgtcgtggccatcctggggaagaatgacatctttggggagcctctgaacctgtatgcaaggcctggcaagtcgaacggggatgtgcgggccctcacctactgtgacctacacaagatccatcgggacgacctgctggaggtgctggacatgtaccctgagttctccgaccacttctggtccagcctggagatcaccttcaacctgcgagataccaacatgatcccgggctcccccggcagtacggagttagagggtggcttcagtcggcaacgcaagcgcaagttgtccttccgcaggcgcacggacaaggataccgaacaacctggcgaagtctccgcgttggggccgggccgggcgggggcagggccgagtagccggggccggccgggggggccgtggggggagagcccgtccagtggcccctccagccctgagagcagtgaggatgagggcccaggccgcagctccagccccctccgcctggtgcccttctccagccccaggccccccggagagccgccgggtggggagcccctgatggaggactgcgagaagagcagcgacacttgcaaccccctgtcaggcgccttctcaggagtgtccaacattttcagcttctggggggacagtcggggccgccagtaccaggagctccctcgatgccccgcccccacccccagcctcctcaacatccccctctccagcccgggtcggcggccccggggcgacgtggagagcaggctggatgccctccagcgccagctcaacaggctggagacccggctgagtgcagacatggccactgtcctgcagctgctacagaggcagatgacgctggtcccgcccgcctacagtgctgtgaccaccccggggcctggccccacttccacatccccgctgttgcccgtcagccccctccccaccctcaccttggactcgctttctcaggtttcccagttcatggcgtgtgaggagctgcccccgggggccccagagcttccccaagaaggccccacacgacgcctctccctaccgggccagctgggggccctcacctcccagcccctgcacagacacggctcggacccgggcagttag

SEQ ID NO: 1036 - protein, 1159 aa, Homo sapiens
MPVRRGHVAPQNTFLDTIIRKFEGQSRKFIIANARVENCAVIYCNDGFCELCGYSRAEVMQRPCTCDFLHGPRTQRRAAAQIAQALLGAEERKVEIAFYRKDGSCFLCLVDVVPVKNEDGAVIMFILNFEVVMEKDMVGSPAHDTNHRGPPTSWLAPGRAKTFRLKLPALLALTARESSVRSGGAGGAGAPGAVVVDVDLTPAAPSSESLALDEVTAMDNHVAGLGPAEERRALVGPGSPPRSAPGQLPSPRAHSLNPDASGSSCSLARTRSRESCASVRRASSADDIEAMRAGVLPPPPRHASTGAMHPLRSGLLNSTSDSDLVRYRTISKIPQITLNFVDLKGDPFLASPTSDREIIAPKIKERTHNVTEKVTQVLSLGADVLPEYKLQAPRIHRWTILHYSPFKAVWDWLILLLVIYTAVFTPYSAAFLLKETEEGPPATECGYACQPLAVVDLIVDIMFIVDILINFRTTYVNANEEVVSHPGRIAVHYFKGWFLIDMVAAIPFDLLIFGSGSEELIGLLKTARLLRLVRVARKLDRYSEYGAAVLFLLMCTFALIAHWLACIWYAIGNMEQPHMDSRIGWLHNLGDQIGKPYNSSGLGGPSIKDKYVTALYFTFSSLTSVGFGNVSPNTNSEKIFSICVMLIGSLMYASIFGNVSAIIQRLYSGTARYHTQMLRVREFIRFHQIPNPLRQRLEEYFQHAWSYTNGIDMNAVLKGFPECLQADICLHLNRSLLQHCKPFRGATKGCLRALAMKFKTTHAPPGDTLVHAGDLLTALYFISRGSIEILRGDVVVAILGKNDIFGEPLNLYARPGKSNGDVRALTYCDLHKIHRDDLLEVLDMYPEFSDHFWSSLEITFNLRDTNMIPGSPGSTELEGGFSRQRKRKLSFRRRTDKDTEQPGEVSALGPGRAGAGPSSRGRPGGPWGESPSSGPSSPESSEDEGPGRSSSPLRLVPFSSPRPPGEPPGGEPLMEDCEKSSDTCNPLSGAFSGVSNIFSFWGDSRGRQYQELPRCPAPTPSLLNIPLSSPGRRPRGDVESRLDALQRQLNRLETRLSADMATVLQLLQRQMTLVPPAYSAVTTPGPGPTSTSPLLPVSPLPTLTLDSLSQVSQFMACEELPPGAPELPQEGPTRRLSLPGQLGALTSQPLHRHGSDPGS

SEQ ID NO: 1037 - DNA, 7824 bp, Artificial Sequence
  Description of Artificial Sequence: Synthetic polynucleotide
cctgcaggcagctgcgcgctcgctcgctcactgaggccgcccgggcaaagcccgggcgtcgggcgacctttggtcgcccggcctcagtgagcgagcgagcgcgcagagagggagtggccaactccatcactaggggttcctgcggccgcaaccgtctagaattccccagtggaaagacgcgcaggcaaaacgcaccacgtgacggagcgtgaccgcgcgccgagcgcgcgccaaggtcgggcaggaagagggcctatttcccatgattccttcatatttgcatatacgatacaaggctgttagagagataattagaattaatttgactgtaaacacaaagatattagtacaaaatacgtgacgtagaaagtaataatttcttgggtagtttgcagttttaaaattatgttttaaaatggactatcatatgcttaccgtaacttgaaagtatttcgatttcttgggtttatatatcttgtggaaaggacgcgggatcggcagagctcccagagaaatattcaagagatatttctctgggagctctgcttttttgaagcttgtcgaccctgtggaatgtgtgtcagttagggtgtggaaagtccccaggctccccagcaggcagaagtatgcaaagcatgccctaggcgtacgcgttacataacttacggtaaatggcccgcctggctgaccgcccaacgacccccgcccattgacgtcaataatgacgtatgttcccatagtaacgccaatagggactttccattgacgtcaatgggtggagtatttacggtaaactgcccacttggcagtacatcaagtgtatcatatgccaagtacgccccctattgacgtcaatgacggtaaatggcccgcctggcattatgcccagtacatgaccttatgggactttcctacttggcagtacatctacgtattagtcatcgctattaccatggtgatgcggttttggcagtacatcaatgggcgtggatagcggtttgactcacggggatttccaagtctccaccccattgacgtcaatgggagtttgttttggcaccaaaatcaacgggactttccaaaatgtcgtaacaactccgccccattgacgcaaatgggcggtaggcgtgtacggtgggaggtctatataagcagagctctctggctaactagagaacccactgcttactggcttatcgaaattaatacgactcactatagggagacccaagcttgcccagaagcaggatgagaagatggcagcccccggcgccccagctgagtacggctacatccggaccgtcctgggccagcagatcctgggacaactggacagctccagcctggcgctgccctccgaggccaagctgaagctggcggggagcagcggccgcggcggccagacagtcaagagcctgcggatccaggagcaggtgcagcagaccctcgcccggaagggccgcagctccgtgggcaacggaaatcttcaccgaaccagcagtgttcctgagtatgtctacaacctacacttggttgaaaatgattttgttggaggccgttcccctgttcctaaaacctatgacatgctaaaggctggcacaactgccacttatgaaggtcgctggggaagaggaacagcacagtacagctcccagaagtccgtggaagaaaggtccttgaggcatcctctgaggagactggagatttctcctgacagcagcccggagagggctcactacacgcacagcgattaccagtacagccagagaagccaggctgggcacaccctgcaccaccaagaaagcaggcgggccgccctcctagtgccaccgagatatgctcgttccgagatcgtgggggtcagccgtgctggcaccacaagcaggcagcgccactttgacacataccacagacagtaccagcatggctctgttagcgacaccgtttttgacagcatccctgccaacccggccctgctcacgtaccccaggccagggaccagccgcagcatgggcaacctcttggagaaggagaactacctgacggcagggctcactgtcgggcaggtcaggccgctggtgcccctgcagcccgtcactcagaacagggcttccaggtcctcctggcatcagagctccttccacagcacccgcacgctgagggaagctgggcccagtgtcgccgtggattccagcgggaggagagcgcacttgactgtcggccaggcggccgcagggggaagtgggaatctgctcactgagagaagcactttcactgactcccagctggggaatgcagacatggagatgactctggagcgagcagtgagtatgctcgaggcagaccacatgctgccatccaggatttctgctgcagctactttcatacagcacgagtgcttccagaaatctgaagctcggaagagggttaaccagcttcgtggcatcctcaagcttctgcagctcctaaaagttcagaatgaagacgttcagcgagctgtgtgtggggccttgagaaacttagtatttgaagacaatgacaacaaattggaggtggctgaactaaatggggtacctcggctgctccaggtgctgaagcaaaccagagacttggagactaaaaaacaaataacaggtttgctgtggaatttgtcatctaatgacaaactcaagaatctcatgataacagaagcattgcttacgctgacggagaatatcatcatccccttttctgggtggcctgaaggagactacccaaaagcaaatggtttgctcgattttgacatattctacaacgtcactggatgcctaagaaacatgagttctgctggcgctgatgggagaaaagcgatgagaagatgtgacggactcattgactcactggtccattatgtcagaggaaccattgcagattaccagccagatgacaaggccacggagaattgtgtgtgcattcttcataacctctcctaccagctggaggctgaactgcctgaaaagtactcccagaatatctatattcaaaaccggaatatccagactgacaacaacaaaagtattggatgttttggcagtcgaagcaggaaagtaaaagagcaataccaggacgtgccgatgccggaggaaaagagcaaccccaagggcgtggagtggctgtggcattccattgttataaggatgtatctgtccttgatcgccaaaagtgtccgcaactacacacaagaagcatccttaggagctctgcagaacctcacggccggaagtggaccaatgccgacatcagtggctcagacagttgtccagaaggaaagtggcctgcagcacacccgaaagatgctgcatgttggtgacccaagtgtgaaaaagacagccatctcgctgctgaggaatctgtcccggaatctttctctgcagaatgaaattgccaaagaaactctccctgatttggtttccatcattcctgacacagtcccgagtactgaccttctcattgaaactacagcctctgcctgttacacattgaacaacataatccaaaacagttaccagaatgcacgcgaccttctaaacaccgggggcatccagaaaattatggccattagtgcaggcgatgcctatgcctccaacaaagcaagtaaagctgcttccgtccttctgtattctctgtgggcacacacggaactgcatcatgcctacaagaaggctcagtttaagaagacagattttgtcaacagccggactgccaaagcctaccactcccttaaagacggaagcggagctactaacttcagcctgctgaagcaggctggcgacgtggaggagaaccctggacctatgcattctagactcgagatggagagcgacgagagcggcctgcccgccatggagatcgagtgccgcatcaccggcaccctgaacggcgtggagttcgagctggtgggcggcggagagggcacccccgagcagggccgcatgaccaacaagatgaagagcaccaaaggcgccctgaccttcagcccctacctgctgagccacgtgatgggctacggcttctaccacttcggcacctaccccagcggctacgagaaccccttcctgcacgccatcaacaacggcggctacaccaacacccgcatcgagaagtacgaggacggcggcgtgctgcacgtgagcttcagctaccgctacgaggccggccgcgtgatcggcgacttcaaggtgatgggcaccggcttccccgaggacagcgtgatcttcaccgacaagatcatccgcagcaacgccaccgtggagcacctgcaccccatgggcgataacgatctggatggcagcttcacccgcaccttcagcctgcgcgacggcggctactacagctccgtggtggacagccacatgcacttcaagagcgccatccaccccagcatcctgcagaacgggggccccatgttcgccttccgccgcgtggaggaggatcacagcaacaccgagctgggcatcgtggagtaccagcacgccttcaagaccccggatgcagatgccggtgaagaaagagtttaaacggccagatctacgggtggcatccctgtgacccctccccagtgcctctcctggccctggaagttgccactccagtgcccaccagccttgtcctaataaaattaagttgcatcattttgtctgactaggtgtccttctataatattatggggtggaggggggtggtatggagcaaggggcaagttgggaagacaacctgtagggcctgcggggtctattgggaaccaagctggagtgcagtggcacaatcttggctcactgcaatctccgcctcctgggttcaagcgattctcctgcctcagcctcccgagttgttgggattccaggcatgcatgaccaggctcagctaatttttgtttttttggtagagacggggtttcaccatattggccaggctggtctccaactcctaatctcaggtgatctacccaccttggcctcccaaattgctgggattacaggcgtgaaccactgctcccttccctgtccttctgattttgtaggtaaccacgtgcggaccgagcggccgcaggaacccctagtgatggagttggccactccctctctgcgcgctcgctcgctcactgaggccgggcgaccaaaggtcgcccgacgcccgggctttgcccgggcggcctcagtgagcgagcgagcgcgcagctgcctgcaggggcgcctgatgcggtattttctccttacgcatctgtgcggtatttcacaccgcatacgtcaaagcaaccatagtacgcgccctgtagcggcgcattaagcgcggcgggtgtggtggttacgcgcagcgtgaccgctacacttgccagcgccctagcgcccgctcctttcgctttcttcccttcctttctcgccacgttcgccggctttccccgtcaagctctaaatcgggggctccctttagggttccgatttagtgctttacggcacctcgaccccaaaaaacttgatttgggtgatggttcacgtagtgggccatcgccctgatagacggtttttcgccctttgacgttggagtccacgttctttaatagtggactcttgttccaaactggaacaacactcaactctatctcgggctattcttttgatttataagggattttgccgatttcggtctattggttaaaaaatgagctgatttaacaaaaatttaacgcgaattttaacaaaatattaacgtttacaattttatggtgcactctcagtacaatctgctctgatgccgcatagttaagccagccccgacacccgccaacacccgctgacgcgccctgacgggcttgtctgctcccggcatccgcttacagacaagctgtgaccgtctccgggagctgcatgtgtcagaggttttcaccgtcatcaccgaaacgcgcgagacgaaagggcctcgtgatacgcctatttttataggttaatgtcatgataataatggtttcttagacgtcaggtggcacttttcggggaaatgtgcgcggaacccctatttgtttatttttctaaatacattcaaatatgtatccgctcatgagacaataaccctgataaatgcttcaataatattgaaaaaggaagagtatgagtattcaacatttccgtgtcgcccttattcccttttttgcggcattttgccttcctgtttttgctcacccagaaacgctggtgaaagtaaaagatgctgaagatcagttgggtgcacgagtgggttacatcgaactggatctcaacagcggtaagatccttgagagttttcgccccgaagaacgttttccaatgatgagcacttttaaagttctgctatgtggcgcggtattatcccgtattgacgccgggcaagagcaactcggtcgccgcatacactattctcagaatgacttggttgagtactcaccagtcacagaaaagcatcttacggatggcatgacagtaagagaattatgcagtgctgccataaccatgagtgataacactgcggccaacttacttctgacaacgatcggaggaccgaaggagctaaccgcttttttgcacaacatgggggatcatgtaactcgccttgatcgttgggaaccggagctgaatgaagccataccaaacgacgagcgtgacaccacgatgcctgtagcaatggcaacaacgttgcgcaaactattaactggcgaactacttactctagcttcccggcaacaattaatagactggatggaggcggataaagttgcaggaccacttctgcgctcggcccttccggctggctggtttattgctgataaatctggagccggtgagcgtgggtctcgcggtatcattgcagcactggggccagatggtaagccctcccgtatcgtagttatctacacgacggggagtcaggcaactatggatgaacgaaatagacagatcgctgagataggtgcctcactgattaagcattggtaactgtcagaccaagtttactcatatatactttagattgatttaaaacttcatttttaatttaaaaggatctaggtgaagatcctttttgataatctcatgaccaaaatcccttaacgtgagttttcgttccactgagcgtcagaccccgtagaaaagatcaaaggatcttcttgagatcctttttttctgcgcgtaatctgctgcttgcaaacaaaaaaaccaccgctaccagcggtggtttgtttgccggatcaagagctaccaactctttttccgaaggtaactggcttcagcagagcgcagataccaaatactgttcttctagtgtagccgtagttaggccaccacttcaagaactctgtagcaccgcctacatacctcgctctgctaatcctgttaccagtggctgctgccagtggcgataagtcgtgtcttaccgggttggactcaagacgatagttaccggataaggcgcagcggtcgggctgaacggggggttcgtgcacacagcccagcttggagcgaacgacctacaccgaactgagatacctacagcgtgagctatgagaaagcgccacgcttcccgaagggagaaaggcggacaggtatccggtaagcggcagggtcggaacaggagagcgcacgagggagcttccagggggaaacgcctggtatctttatagtcctgtcgggtttcgccacctctgacttgagcgtcgatttttgtgatgctcgtcaggggggcggagcctatggaaaaacgccagcaacgcggcctttttacggttcctggccttttgctggccttttgctcacatgt

SEQ ID NO: 1038 - DNA, 2514 bp, Homo sapiens
atggcagcccccggcgccccagctgagtacggctacatccggaccgtcctgggccagcagatcctgggacaactggacagctccagcctggcgctgccctccgaggccaagctgaagctggcggggagcagcggccgcggcggccagacagtcaagagcctgcggatccaggagcaggtgcagcagaccctcgcccggaagggccgcagctccgtgggcaacggaaatcttcaccgaaccagcagtgttcctgagtatgtctacaacctacacttggttgaaaatgattttgttggaggccgttcccctgttcctaaaacctatgacatgctaaaggctggcacaactgccacttatgaaggtcgctggggaagaggaacagcacagtacagctcccagaagtccgtggaagaaaggtccttgaggcatcctctgaggagactggagatttctcctgacagcagcccggagagggctcactacacgcacagcgattaccagtacagccagagaagccaggctgggcacaccctgcaccaccaagaaagcaggcgggccgccctcctagtgccaccgagatatgctcgttccgagatcgtgggggtcagccgtgctggcaccacaagcaggcagcgccactttgacacataccacagacagtaccagcatggctctgttagcgacaccgtttttgacagcatccctgccaacccggccctgctcacgtaccccaggccagggaccagccgcagcatgggcaacctcttggagaaggagaactacctgacggcagggctcactgtcgggcaggtcaggccgctggtgcccctgcagcccgtcactcagaacagggcttccaggtcctcctggcatcagagctccttccacagcacccgcacgctgagggaagctgggcccagtgtcgccgtggattccagcgggaggagagcgcacttgactgtcggccaggcggccgcagggggaagtgggaatctgctcactgagagaagcactttcactgactcccagctggggaatgcagacatggagatgactctggagcgagcagtgagtatgctcgaggcagaccacatgctgccatccaggatttctgctgcagctactttcatacagcacgagtgcttccagaaatctgaagctcggaagagggttaaccagcttcgtggcatcctcaagcttctgcagctcctaaaagttcagaatgaagacgttcagcgagctgtgtgtggggccttgagaaacttagtatttgaagacaatgacaacaaattggaggtggctgaactaaatggggtacctcggctgctccaggtgctgaagcaaaccagagacttggagactaaaaaacaaataacaggtttgctgtggaatttgtcatctaatgacaaactcaagaatctcatgataacagaagcattgcttacgctgacggagaatatcatcatccccttttctgggtggcctgaaggagactacccaaaagcaaatggtttgctcgattttgacatattctacaacgtcactggatgcctaagaaacatgagttctgctggcgctgatgggagaaaagcgatgagaagatgtgacggactcattgactcactggtccattatgtcagaggaaccattgcagattaccagccagatgacaaggccacggagaattgtgtgtgcattcttcataacctctcctaccagctggaggcagagctcccagagaaatattcccagaatatctatattcaaaaccggaatatccagactgacaacaacaaaagtattggatgttttggcagtcgaagcaggaaagtaaaagagcaataccaggacgtgccgatgccggaggaaaagagcaaccccaagggcgtggagtggctgtggcattccattgttataaggatgtatctgtccttgatcgccaaaagtgtccgcaactacacacaagaagcatccttaggagctctgcagaacctcacggccggaagtggaccaatgccgacatcagtggctcagacagttgtccagaaggaaagtggcctgcagcacacccgaaagatgctgcatgttggtgacccaagtgtgaaaaagacagccatctcgctgctgaggaatctgtcccggaatctttctctgcagaatgaaattgccaaagaaactctccctgatttggtttccatcattcctgacacagtcccgagtactgaccttctcattgaaactacagcctctgcctgttacacattgaacaacataatccaaaacagttaccagaatgcacgcgaccttctaaacaccgggggcatccagaaaattatggccattagtgcaggcgatgcctatgcctccaacaaagcaagtaaagctgcttccgtccttctgtattctctgtgggcacacacggaactgcatcatgcctacaagaaggctcagtttaagaagacagattttgtcaacagccggactgccaaagcctaccactcccttaaagactga

SEQ ID NO: 1039 - DNA, 2514 bp, Artificial Sequence
  Description of Artificial Sequence: Synthetic polynucleotide
atggcagcccccggcgccccagctgagtacggctacatccggaccgtcctgggccagcagatcctgggacaactggacagctccagcctggcgctgccctccgaggccaagctgaagctggcggggagcagcggccgcggcggccagacagtcaagagcctgcggatccaggagcaggtgcagcagaccctcgcccggaagggccgcagctccgtgggcaacggaaatcttcaccgaaccagcagtgttcctgagtatgtctacaacctacacttggttgaaaatgattttgttggaggccgttcccctgttcctaaaacctatgacatgctaaaggctggcacaactgccacttatgaaggtcgctggggaagaggaacagcacagtacagctcccagaagtccgtggaagaaaggtccttgaggcatcctctgaggagactggagatttctcctgacagcagcccggagagggctcactacacgcacagcgattaccagtacagccagagaagccaggctgggcacaccctgcaccaccaagaaagcaggcgggccgccctcctagtgccaccgagatatgctcgttccgagatcgtgggggtcagccgtgctggcaccacaagcaggcagcgccactttgacacataccacagacagtaccagcatggctctgttagcgacaccgtttttgacagcatccctgccaacccggccctgctcacgtaccccaggccagggaccagccgcagcatgggcaacctcttggagaaggagaactacctgacggcagggctcactgtcgggcaggtcaggccgctggtgcccctgcagcccgtcactcagaacagggcttccaggtcctcctggcatcagagctccttccacagcacccgcacgctgagggaagctgggcccagtgtcgccgtggattccagcgggaggagagcgcacttgactgtcggccaggcggccgcagggggaagtgggaatctgctcactgagagaagcactttcactgactcccagctggggaatgcagacatggagatgactctggagcgagcagtgagtatgctcgaggcagaccacatgctgccatccaggatttctgctgcagctactttcatacagcacgagtgcttccagaaatctgaagctcggaagagggttaaccagcttcgtggcatcctcaagcttctgcagctcctaaaagttcagaatgaagacgttcagcgagctgtgtgtggggccttgagaaacttagtatttgaagacaatgacaacaaattggaggtggctgaactaaatggggtacctcggctgctccaggtgctgaagcaaaccagagacttggagactaaaaaacaaataacaggtttgctgtggaatttgtcatctaatgacaaactcaagaatctcatgataacagaagcattgcttacgctgacggagaatatcatcatccccttttctgggtggcctgaaggagactacccaaaagcaaatggtttgctcgattttgacatattctacaacgtcactggatgcctaagaaacatgagttctgctggcgctgatgggagaaaagcgatgagaagatgtgacggactcattgactcactggtccattatgtcagaggaaccattgcagattaccagccagatgacaaggccacggagaattgtgtgtgcattcttcataacctctcctaccagctggaggctgaactgcctgaaaagtactcccagaatatctatattcaaaaccggaatatccagactgacaacaacaaaagtattggatgttttggcagtcgaagcaggaaagtaaaagagcaataccaggacgtgccgatgccggaggaaaagagcaaccccaagggcgtggagtggctgtggcattccattgttataaggatgtatctgtccttgatcgccaaaagtgtccgcaactacacacaagaagcatccttaggagctctgcagaacctcacggccggaagtggaccaatgccgacatcagtggctcagacagttgtccagaaggaaagtggcctgcagcacacccgaaagatgctgcatgttggtgacccaagtgtgaaaaagacagccatctcgctgctgaggaatctgtcccggaatctttctctgcagaatgaaattgccaaagaaactctccctgatttggtttccatcattcctgacacagtcccgagtactgaccttctcattgaaactacagcctctgcctgttacacattgaacaacataatccaaaacagttaccagaatgcacgcgaccttctaaacaccgggggcatccagaaaattatggccattagtgcaggcgatgcctatgcctccaacaaagcaagtaaagctgcttccgtccttctgtattctctgtgggcacacacggaactgcatcatgcctacaagaaggctcagtttaagaagacagattttgtcaacagccggactgccaaagcctaccactcccttaaagactga

SEQ ID NO: 1040 - protein, 837 aa, Homo sapiens
MAAPGAPAEYGYIRTVLGQQILGQLDSSSLALPSEAKLKLAGSSGRGGQTVKSLRIQEQVQQTLARKGRSSVGNGNLHRTSSVPEYVYNLHLVENDFVGGRSPVPKTYDMLKAGTTATYEGRWGRGTAQYSSQKSVEERSLRHPLRRLEISPDSSPERAHYTHSDYQYSQRSQAGHTLHHQESRRAALLVPPRYARSEIVGVSRAGTTSRQRHFDTYHRQYQHGSVSDTVFDSIPANPALLTYPRPGTSRSMGNLLEKENYLTAGLTVGQVRPLVPLQPVTQNRASRSSWHQSSFHSTRTLREAGPSVAVDSSGRRAHLTVGQAAAGGSGNLLTERSTFTDSQLGNADMEMTLERAVSMLEADHMLPSRISAAATFIQHECFQKSEARKRVNQLRGILKLLQLLKVQNEDVQRAVCGALRNLVFEDNDNKLEVAELNGVPRLLQVLKQTRDLETKKQITGLLWNLSSNDKLKNLMITEALLTLTENIIIPFSGWPEGDYPKANGLLDFDIFYNVTGCLRNMSSAGADGRKAMRRCDGLIDSLVHYVRGTIADYQPDDKATENCVCILHNLSYQLEAELPEKYSQNIYIQNRNIQTDNNKSIGCFGSRSRKVKEQYQDVPMPEEKSNPKGVEWLWHSIVIRMYLSLIAKSVRNYTQEASLGALQNLTAGSGPMPTSVAQTVVQKESGLQHTRKMLHVGDPSVKKTAISLLRNLSRNLSLQNEIAKETLPDLVSIIPDTVPSTDLLIETTASACYTLNNIIQNSYQNARDLLNTGGIQKIMAISAGDAYASNKASKAASVLLYSLWAHTELHHAYKKAQFKKTDFVNSRTAKAYHSLKD

SEQ ID NO: 1041 - DNA, 13516 bp, Artificial Sequence
  Description of Artificial Sequence: Synthetic polynucleotide
gtcgacggatcgggagatctcccgatcccctatggtgcactctcagtacaatctgctctgatgccgcatagttaagccagtatctgctccctgcttgtgtgttggaggtcgctgagtagtgcgcgagcaaaatttaagctacaacaaggcaaggcttgaccgacaattgcatgaagaatctgcttagggttaggcgttttgcgctgcttcgcgatgtacgggccagatatcgcgttgacattgattattgactagttattaatagtaatcaattacggggtcattagttcatagcccatatatggagttccgcgttacataacttacggtaaatggcccgcctggctgaccgcccaacgacccccgcccattgacgtcaataatgacgtatgttcccatagtaacgccaatagggactttccattgacgtcaatgggtggagtatttacggtaaactgcccacttggcagtacatcaagtgtatcatatgccaagtacgccccctattgacgtcaatgacggtaaatggcccgcctggcattatgcccagtacatgaccttatgggactttcctacttggcagtacatctacgtattagtcatcgctattaccatggtgatgcggttttggcagtacatcaatgggcgtggatagcggtttgactcacggggatttccaagtctccaccccattgacgtcaatgggagtttgttttggcaccaaaatcaacgggactttccaaaatgtcgtaacaactccgccccattgacgcaaatgggcggtaggcgtgtacggtgggaggtctatataagcagcgcgttttgcctgtactgggtctctctggttagaccagatctgagcctgggagctctctggctaactagggaacccactgcttaagcctcaataaagcttgccttgagtgcttcaagtagtgtgtgcccgtctgttgtgtgactctggtaactagagatccctcagacccttttagtcagtgtggaaaatctctagcagtggcgcccgaacagggacttgaaagcgaaagggaaaccagaggagctctctcgacgcaggactcggcttgctgaagcgcgcacggcaagaggcgaggggcggcgactggtgagtacgccaaaaattttgactagcggaggctagaaggagagagatgggtgcgagagcgtcagtattaagcgggggagaattagatcgcgatgggaaaaaattcggttaaggccagggggaaagaaaaaatataaattaaaacatatagtatgggcaagcagggagctagaacgattcgcagttaatcctggcctgttagaaacatcagaaggctgtagacaaatactgggacagctacaaccatcccttcagacaggatcagaagaacttagatcattatataatacagtagcaaccctctattgtgtgcatcaaaggatagagataaaagacaccaaggaagctttagacaagatagaggaagagcaaaacaaaagtaagaccaccgcacagcaagcggccggccgctgatcttcagacctggaggaggagatatgagggacaattggagaagtgaattatataaatataaagtagtaaaaattgaaccattaggagtagcacccaccaaggcaaagagaagagtggtgcagagagaaaaaagagcagtgggaataggagctttgttccttgggttcttgggagcagcaggaagcactatgggcgcagcgtcaatgacgctgacggtacaggccagacaattattgtctggtatagtgcagcagcagaacaatttgctgagggctattgaggcgcaacagcatctgttgcaactcacagtctggggcatcaagcagctccaggcaagaatcctggctgtggaaagatacctaaaggatcaacagctcctggggatttggggttgctctggaaaactcatttgcaccactgctgtgccttggaatgctagttggagtaataaatctctggaacagatttggaatcacacgacctggatggagtgggacagagaaattaacaattacacaagcttaatacactccttaattgaagaatcgcaaaaccagcaagaaaagaatgaacaagaattattggaattagataaatgggcaagtttgtggaattggtttaacataacaaattggctgtggtatataaaattattcataatgatagtaggaggcttggtaggtttaagaatagtttttgctgtactttctatagtgaatagagttaggcagggatattcaccattatcgtttcagacccacctcccaaccccgaggggacccgacaggcccgaaggaatagaagaagaaggtggagagagagacagagacagatccattcgattagtgaacggatcggcactgcgtgcgccaattctgcagacaaatggcagtattcatccacaattttaaaagaaaaggggggattggggggtacagtgcaggggaaagaatagtagacataatagcaacagacatacaaactaaagaattacaaaaacaaattacaaaaattcaaaattttcgggtttattacagggacagcagagatccagtttggttagtaccgggcccgctctaggaattccccagtggaaagacgcgcaggcaaaacgcaccacgtgacggagcgtgaccgcgcgccgagcgcgcgccaaggtcgggcaggaagagggcctatttcccatgattccttcatatttgcatatacgatacaaggctgttagagagataattagaattaatttgactgtaaacacaaagatattagtacaaaatacgtgacgtagaaagtaataatttcttgggtagtttgcagttttaaaattatgttttaaaatggactatcatatgcttaccgtaacttgaaagtatttcgatttcttgggtttatatatcttgtggaaaggacgcgggatcgggttcactcgctcttcaacatgctcatcatcaagagtgatgagcatgttgaagagcgagtgaaccttttttgaagcttgtcgaccctgtggaatgtgtgtcagttagggtgtggaaagtccccaggctccccagcaggcagaagtatgcaaagcatgccctaggcgtacgcgttacataacttacggtaaatggcccgcctggctgaccgcccaacgacccccgcccattgacgtcaataatgacgtatgttcccatagtaacgccaatagggactttccattgacgtcaatgggtggactatttacggtaaactgcccacttggcagtacatcaagtgtatcatatgccaagtacgccccctattgacgtcaatgacggtaaatggcccgcctggcattatgcccagtacatgaccttatgggactttcctacttggcagtacatctacgtattagtcatcgctattaccatggtgatgcggttttggcagtacatcaatgggcgtggatagcggtttgactcacggggatttccaagtctccaccccattgacgtcaatgggagtttgttttggcaccaaaatcaacgggactttccaaaatgtcgtaacaactccgccccattgacgcaaatgggcggtaggcgtgtacggtgggaggtctatataagcagagctctctggctaactagagaacccactgcttactggcttatcgaaattaatacgactcactatagggagacccaagcttgcccagaagcaggatgagaagatggcaaacttcctattacctcggggcaccagcagcttccgcaggttcacacgggagtccctggcagccatcgagaagcgcatggcggagaagcaagcccgcggctcaaccaccttgcaggagagccgagaggggctgcccgaggaggaggctccccggccccagctggacctgcaggcctccaaaaagctgccagatctctatggcaatccaccccaagagctcatcggagagcccctggaggacctggaccccttctatagcacccaaaagactttcatcgtactgaataaaggcaagaccatcttccggttcagtgccaccaacgccttgtatgtcctcagtcccttccaccccatccggagagcggctgtgaagattctcgtccattccctgtttaatatgctgataatgtgcaccatcctcaccaactgcgtgttcatggcccagcacgaccctccaccctggaccaagtatgtcgagtacaccttcaccgccatttacacctttgagtctctggtcaagattctggctcgaggcttctgcctgcacgcgttcactttccttcgggacccatggaactggctggactttagtgtgattatcatggcatacacaactgaatttgtggacctgggcaatgtctcagccttacgcaccttccgagtcctccgggccctgaaaactatatcagtcatttcagggctgaagaccatcgtgggggccctgatccagtctgtgaagaagctggctgatgtgatggtcctcacagtcttctgcctcagcgtctttgccctcatcggcctgcagctcttcatgggcaacctaaggcacaagtgcgtgcgcaacttcacagcgctcaacggcaccaacggctccgtggaggccgacggcttggtctgggaatccctggacctttacctcagtgatccagaaaattacctgctcaagaacggcacctctgatgtgttactgtgtgggaacagctctgacgctgggacatgtccggagggctaccggtgcctaaaggcaggcgagaaccccgaccacggctacaccagcttcgattcctttgcctgggcctttcttgcactcttccgcctgatgacgcaggactgctgggagcgcctctatcagcagaccctcaggtccgcagggaagatctacatgatcttcttcatgcttgtcatcttcctggggtccttctacctggtgaacctgatcctggccgtggtcgcaatggcctatgaggagcaaaaccaagccaccatcgctgagaccgaggagaaggaaaagcgcttccaggaggccatggaaatgctcaagaaagaacacgaggccctcaccatcaggggtgtggataccgtgtcccgtagctccttggagatgtcccctttggccccagtaaacagccatgagagaagaagcaagaggagaaaacggatgtcttcaggaactgaggagtgtggggaggacaggctccccaagtctgactcagaagatggtcccagagcaatgaatcatctcagcctcacccgtggcctcagcaggacttctatgaagccacgttccagccgcgggagcattttcacctttcgcaggcgagacctgggttctgaagcagattttgcagatgatgaaaacagcacagcgggggagagcgagagccaccacacatcactgctggtgccctggcccctgcgccggaccagtgcccagggacagcccagtcccggaacctcggctcctggccacgccctccatggcaaaaagaacagcactgtggactgcaatggggtggtctcattactgggggcaggcgacccagaggccacatccccaggaagccacctcctccgccctgtgatgctagagcacccgccagacacgaccacgccatcggaggagccaggcgggccccagatgctgacctcccaggctccgtgtgtagatggcttcgaggagccaggagcacggcagcgggccctcagcgcagtcagcgtcctcaccagcgcactggaagagttagaggagtctcgccacaagtgtccaccatgctggaaccgtctcgcccagcgctacctgatctgggagtgctgcccgctgtggatgtccatcaagcagggagtgaagttggtggtcatggacccgtttactgacctcaccatcactatgtgcatcgtactcaacacactcttcatggcgctggagcactacaacatgacaagtgaattcgaggagatgctgcaggtcggaaacctggtcttcacagggattttcacagcagagatgaccttcaagatcattgccctcgacccctactactacttccaacagggctggaacatcttcgacagcatcatcgtcatccttagcctcatggagctgggcctgtcccgcatgagcaacttgtcggtgctgcgctccttccgcctgctgcgggtcttcaagctggccaaatcatggcccaccctgaacacactcatcaagatcatcgggaactcagtgggggcactggggaacctgacactggtgctagccatcatcgtgttcatctttgctgtggtgggcatgcagctctttggcaagaactactcggagctgagggacagcgactcaggcctgctgcctcgctggcacatgatggacttctttcatgccttcctcatcatcttccgcatcctctgtggagagtggatcgagaccatgtgggactgcatggaggtgtcggggcagtcattatgcctgctggtcttcttgcttgttatggtcattggcaaccttgtggtcctgaatctcttcctggccttgctgctcagctccttcagtgcagacaacctcacagcccctgatgaggacagagagatgaacaacctccagctggccctggcccgcatccagaggggcctgcgctttgtcaagcggaccacctgggatttctgctgtggtctcctgcggcagcggcctcagaagcccgcagcccttgccgcccagggccagctgcccagctgcattgccaccccctactccccgccacccccagagacggagaaggtgcctcccacccgcaaggaaacacggtttgaggaaggcgagcaaccaggccagggcacccccggggatccagagcccgtgtgtgtgcccatcgctgtggccgagtcagacacagatgaccaagaagaagatgaggagaacagcctgggcacggaggaggagtccagcaagcaggaatcccagcctgtgtccggtggcccagaggcccctccggattccaggacctggagccaggtgtcagcgactgcctcctctgaggccgaggccagtgcatctcaggccgactggcggcagcagtggaaagcggaaccccaggccccagggtgcggtgagaccccagaggacagttgctccgagggcagcacagcagacatgaccaacaccgctgagctcctggagcagatccctgacctcggccaggatgtcaaggacccagaggactgcttcactgaaggctgtgtccggcgctgtccctgctgtgcggtggacaccacacaggccccagggaaggtctggtggcggttgcgcaagacctgctaccacatcgtggagcacagctggttcgagacattcatcatcttcatgatcctactcagcagtggagcgctggccttcgaggacatctacctagaggagcggaagaccatcaaggttctgcttgagtatgccgacaagatgttcacatatgtcttcgtgctggagatgctgctcaagtgggtggcctacggcttcaagaagtacttcaccaatgcctggtgctggctcgacttcctcatcgtagacgtctctctggtcagcctggtggccaacaccctgggctttgccgagatgggccccatcaagtcactgcggacgctgcgtgcactccgtcctctgagagctctgtcacgatttgagggcatgagggtggtggtcaatgccctggtgggcgccatcccgtccatcatgaacgtcctcctcgtctgcctcatcttctggctcatcttcagcatcatgggcgtgaacctctttgcggggaagtttgggaggtgcatcaaccagacagagggagacttgcctttgaactacaccatcgtgaacaacaagagccagtgtgagtccttgaacttgaccggagaattgtactggaccaaggtgaaagtcaactttgacaacgtgggggccgggtacctggcccttctgcaggtggcaacatttaaaggctggatggacattatgtatgcagctgtggactccagggggtatgaagagcagcctcagtgggaatacaacctctacatgtacatctattttgtcattttcatcatctttgggtctttcttcaccctgaacctctttattggtgtcatcattgacaacttcaaccaacagaagaaaaagttagggggccaggacatcttcatgacagaggagcagaagaagtactacaatgccatgaagaagctgggctccaagaagccccagaagcccatcccacggcccctgaacaagtaccagggcttcatattcgacattgtgaccaagcaggcctttgacgtcaccatcatgtttctgatctgcttgaatatggtgaccatgatggtggagacagatgaccaaagtcctgagaaaatcaacatcttggccaagatcaacctgctctttgtggccatcttcacaggcgagtgtattgtcaagctggctgccctgcgccactactacttcaccaacagctggaatatcttcgacttcgtggttgtcatcctctccatcgtgggcactgtgctctcggacatcatccagaagtacttcttctccccgacgctcttccgagtcatccgcctggcccgaataggccgcatcctcagactgatccgaggggccaaggggatccgcacgctgctctttgccctcatgatgtccctgcctgccctcttcaacatcgggctgctgctcttcctcgtcatgttcatctactccatctttggcatggccaacttcgcttatgtcaagtgggaggctggcatcgacgacatgttcaacttccagaccttcgccaacagcatgctgtgcctcttccagatcaccacgtcggccggctgggatggcctcctcagccccatcctcaacactgggccgccctactgcgaccccactctgcccaacagcaatggctctcggggggactgcgggagcccagccgtgggcatcctcttcttcaccacctacatcatcatctccttcctcatcgtggtcaacatgtacattgccatcatcctggagaacttcagcgtggccacggaggagagcaccgagcccctgagtgaggacgacttcgatatgttctatgagatctgggagaaatttgacccagaggccactcagtttattgagtattcggtcctgtctgactttgccgatgccctgtctgagccactccgtatcgccaagcccaaccagataagcctcatcaacatggacctgcccatggtgagtggggaccgcatccattgcatggacattctctttgccttcaccaaaagggtcctgggggagtctggggagatggacgccctgaagatccagatggaggagaagttcatggcagccaacccatccaagatctcctacgagcccatcaccaccacactccggcgcaagcacgaagaggtgtcggccatggttatccagagagccttccgcaggcacctgctgcaacgctctttgaagcatgcctccttcctcttccgtcagcaggcgggcagcggcctctccgaagaggatgcccctgagcgagagggcctcatcgcctacgtgatgagtgagaacttctcccgaccccttggcccaccctccagctcctccatctcctccacttccttcccaccctcctatgacagtgtcactagagccaccagcgataacctccaggtgcgggggtctgactacagccacagtgaagatctcgccgacttccccccttctccggacagggaccgtgagtccatcgtgggaagcggagctactaacttcagcctgctgaagcaggctggcgacgtggaggagaaccctggacctatgcattctagactcgagatggagagcgacgagagcggcctgcccgccatggagatcgagtgccgcatcaccggcaccctgaacggcgtggagttcgagctggtgggcggcggagagggcacccccgagcagggccgcatgaccaacaagatgaagagcaccaaaggcgccctgaccttcagcccctacctgctgagccacgtgatgggctacggcttctaccacttcggcacctaccccagcggctacgagaaccccttcctgcacgccatcaacaacggcggctacaccaacacccgcatcgagaagtacgaggacggcggcgtgctgcacgtgagcttcagctaccgctacgaggccggccgcgtgatcggcgacttcaaggtgatgggcaccggcttccccgaggacagcgtgatcttcaccgacaagatcatccgcagcaacgccaccgtggagcacctgcaccccatgggcgataacgatctggatggcagcttcacccgcaccttcagcctgcgcgacggcggctactacagctccgtggtggacagccacatgcacttcaagagcgccatccaccccagcatcctgcagaacgggggccccatgttcgccttccgccgcgtggaggaggatcacagcaacaccgagctgggcatcgtggagtaccagcacgccttcaagaccccggatgcagatgccggtgaagaaagagtttaaacggccggccgcggtctgtacaagtaggattcgtcgagggacctaataacttcgtatagcatacattatacgaagttatacatgtttaagggttccggttccactaggtacaattcgatatcaagcttatcgataatcaacctctggattacaaaatttgtgaaagattgactggtattcttaactatgttgctccttttacgctatgtggatacgctgctttaatgcctttgtatcatgctattgcttcccgtatggctttcattttctcctccttgtataaatcctggttgctgtctctttatgaggagttgtggcccgttgtcaggcaacgtggcgtggtgtgcactgtgtttgctgacgcaacccccactggttggggcattgccaccacctgtcagctcctttccgggactttcgctttccccctccctattgccacggcggaactcatcgccgcctgccttgcccgctgctggacaggggctcggctgttgggcactgacaattccgtggtgttgtcggggaaatcatcgtcctttccttggctgctcgcctgtgttgccacctggattctgcgcgggacgtccttctgctacgtcccttcggccctcaatccagcggaccttccttcccgcggcctgctgccggctctgcggcctcttccgcgtcttcgccttcgccctcagacgagtcggatctccctttgggccgcctccccgcatcgataccgtcgacctcgatcgagacctagaaaaacatggagcaatcacaagtagcaatacagcagctaccaatgctgattgtgcctggctagaagcacaagaggaggaggaggtgggttttccagtcacacctcaggtacctttaagaccaatgacttacaaggcagctgtagatcttagccactttttaaaagaaaaggggggactggaagggctaattcactcccaacgaagacaagatatccttgatctgtggatctaccacacacaaggctacttccctgattggcagaactacacaccagggccagggatcagatatccactgacctttggatggtgctacaagctagtaccagttgagcaagagaaggtagaagaagccaatgaaggagagaacacccgcttgttacaccctgtgagcctgcatgggatggatgacccggagagagaagtattagagtggaggtttgacagccgcctagcatttcatcacatggcccgagagctgcatccggactgtactgggtctctctggttagaccagatctgagcctgggagctctctggctaactagggaacccactgcttaagcctcaataaagcttgccttgagtgcttcaagtagtgtgtgcccgtctgttgtgtgactctggtaactagagatccctcagacccttttagtcagtgtggaaaatctctagcagcatgtgagcaaaaggccagcaaaaggccaggaaccgtaaaaaggccgcgttgctggcgtttttccataggctccgcccccctgacgagcatcacaaaaatcgacgctcaagtcagaggtggcgaaacccgacaggactataaagataccaggcgtttccccctggaagctccctcgtgcgctctcctgttccgaccctgccgcttaccggatacctgtccgcctttctcccttcgggaagcgtggcgctttctcatagctcacgctgtaggtatctcagttcggtgtaggtcgttcgctccaagctgggctgtgtgcacgaaccccccgttcagcccgaccgctgcgccttatccggtaactatcgtcttgagtccaacccggtaagacacgacttatcgccactggcagcagccactggtaacaggattagcagagcgaggtatgtaggcggtgctacagagttcttgaagtggtggcctaactacggctacactagaagaacagtatttggtatctgcgctctgctgaagccagttaccttcggaaaaagagttggtagctcttgatccggcaaacaaaccaccgctggtagcggtggtttttttgtttgcaagcagcagattacgcgcagaaaaaaaggatctcaagaagatcctttgatcttttctacggggtctgacgctcagtggaacgaaaactcacgttaagggattttggtcatgattacgccccgccctgccactcatcgcagtactgttgtaattcattaagcattctgccgacatggaagccatcacaaacggcatgatgaacctgaatcgccagcggcatcagcaccttgtcgccttgcgtataatatttgcccatggtgaaaacgggggcgaagaagttgtccatattggccacgtttaaatcaaaactggtgaaactcacccagggattggctgaaacgaaaaacatattctcaataaaccctttagggaaataggccaggttttcaccgtaacacgccacatcttgcgaatatatgtgtagaaactgccggaaatcgtcgtggtattcactccagagcgatgaaaacgtttcagtttgctcatggaaaacggtgtaacaagggtgaacactatcccatatcaccagctcaccgtctttcattgccatacggaactccggatgagcattcatcaggcgggcaagaatgtgaataaaggccggataaaacttgtgcttatttttctttacggtctttaaaaaggccgtaatatccagctgaacggtctggttataggtacattgagcaactgactgaaatgcctcaaaatgttctttacgatgccattgggatatatcaacggtggtatatccagtgatttttttctccatactcttcctttttcaatattattgaagcatttatcagggttattgtctcatgagcggatacatatttgaatgtatttagaaaaataaacaaataggggttccgcgcacatttccccgaaaagtgccacctgac

SEQ ID NO: 1042 - DNA, 6048 bp, Homo sapiens
atggcaaacttcctattacctcggggcaccagcagcttccgcaggttcacacgggagtccctggcagccatcgagaagcgcatggcagagaagcaagcccgcggctcaaccaccttgcaggagagccgagaggggctgcccgaggaggaggctccccggccccagctggacctgcaggcctccaaaaagctgccagatctctatggcaatccaccccaagagctcatcggagagcccctggaggacctggaccccttctatagcacccaaaagactttcatcgtactgaataaaggcaagaccatcttccggttcagtgccaccaacgccttgtatgtcctcagtcccttccaccccatccggagagcggctgtgaagattctggttcactcgctcttcaacatgctcatcatgtgcaccatcctcaccaactgcgtgttcatggcccagcacgaccctccaccctggaccaagtatgtcgagtacaccttcaccgccatttacacctttgagtctctggtcaagattctggctcgaggcttctgcctgcacgcgttcactttccttcgggacccatggaactggctggactttagtgtgattatcatggcatacacaactgaatttgtggacctgggcaatgtctcagccttacgcaccttccgagtcctccgggccctgaaaactatatcagtcatttcagggctgaagaccatcgtgggggccctgatccagtctgtgaagaagctggctgatgtgatggtcctcacagtcttctgcctcagcgtctttgccctcatcggcctgcagctcttcatgggcaacctaaggcacaagtgcgtgcgcaacttcacagcgctcaacggcaccaacggctccgtggaggccgacggcttggtctgggaatccctggacctttacctcagtgatccagaaaattacctgctcaagaacggcacctctgatgtgttactgtgtgggaacagctctgacgctgggacatgtccggagggctaccggtgcctaaaggcaggcgagaaccccgaccacggctacaccagcttcgattcctttgcctgggcctttcttgcactcttccgcctgatgacgcaggactgctgggagcgcctctatcagcagaccctcaggtccgcagggaagatctacatgatcttcttcatgcttgtcatcttcctggggtccttctacctggtgaacctgatcctggccgtggtcgcaatggcctatgaggagcaaaaccaagccaccatcgctgagaccgaggagaaggaaaagcgcttccaggaggccatggaaatgctcaagaaagaacacgaggccctcaccatcaggggtgtggataccgtgtcccgtagctccttggagatgtcccctttggccccagtaaacagccatgagagaagaagcaagaggagaaaacggatgtcttcaggaactgaggagtgtggggaggacaggctccccaagtctgactcagaagatggtcccagagcaatgaatcatctcagcctcacccgtggcctcagcaggacttctatgaagccacgttccagccgcgggagcattttcacctttcgcaggcgagacctgggttctgaagcagattttgcagatgatgaaaacagcacagcgggggagagcgagagccaccacacatcactgctggtgccctggcccctgcgccggaccagtgcccagggacagcccagtcccggaacctcggctcctggccacgccctccatggcaaaaagaacagcactgtggactgcaatggggtggtctcattactgggggcaggcgacccagaggccacatccccaggaagccacctcctccgccctgtgatgctagagcacccgccagacacgaccacgccatcggaggagccaggcgggccccagatgctgacctcccaggctccgtgtgtagatggcttcgaggagccaggagcacggcagcgggccctcagcgcagtcagcgtcctcaccagcgcactggaagagttagaggagtctcgccacaagtgtccaccatgctggaaccgtctcgcccagcgctacctgatctgggagtgctgcccgctgtggatgtccatcaagcagggagtgaagttggtggtcatggacccgtttactgacctcaccatcactatgtgcatcgtactcaacacactcttcatggcgctggagcactacaacatgacaagtgaattcgaggagatgctgcaggtcggaaacctggtcttcacagggattttcacagcagagatgaccttcaagatcattgccctcgacccctactactacttccaacagggctggaacatcttcgacagcatcatcgtcatccttagcctcatggagctgggcctgtcccgcatgagcaacttgtcggtgctgcgctccttccgcctgctgcgggtcttcaagctggccaaatcatggcccaccctgaacacactcatcaagatcatcgggaactcagtgggggcactggggaacctgacactggtgctagccatcatcgtgttcatctttgctgtggtgggcatgcagctctttggcaagaactactcggagctgagggacagcgactcaggcctgctgcctcgctggcacatgatggacttctttcatgccttcctcatcatcttccgcatcctctgtggagagtggatcgagaccatgtgggactgcatggaggtgtcggggcagtcattatgcctgctggtcttcttgcttgttatggtcattggcaaccttgtggtcctgaatctcttcctggccttgctgctcagctccttcagtgcagacaacctcacagcccctgatgaggacagagagatgaacaacctccagctggccctggcccgcatccagaggggcctgcgctttgtcaagcggaccacctgggatttctgctgtggtctcctgcggcagcggcctcagaagcccgcagcccttgccgcccagggccagctgcccagctgcattgccaccccctactccccgccacccccagagacggagaaggtgcctcccacccgcaaggaaacacggtttgaggaaggcgagcaaccaggccagggcacccccggggatccagagcccgtgtgtgtgcccatcgctgtggccgagtcagacacagatgaccaagaagaagatgaggagaacagcctgggcacggaggaggagtccagcaagcaggaatcccagcctgtgtccggtggcccagaggcccctccggattccaggacctggagccaggtgtcagcgactgcctcctctgaggccgaggccagtgcatctcaggccgactggcggcagcagtggaaagcggaaccccaggccccagggtgcggtgagaccccagaggacagttgctccgagggcagcacagcagacatgaccaacaccgctgagctcctggagcagatccctgacctcggccaggatgtcaaggacccagaggactgcttcactgaaggctgtgtccggcgctgtccctgctgtgcggtggacaccacacaggccccagggaaggtctggtggcggttgcgcaagacctgctaccacatcgtggagcacagctggttcgagacattcatcatcttcatgatcctactcagcagtggagcgctggccttcgaggacatctacctagaggagcggaagaccatcaaggttctgcttgagtatgccgacaagatgttcacatatgtcttcgtgctggagatgctgctcaagtgggtggcctacggcttcaagaagtacttcaccaatgcctggtgctggctcgacttcctcatcgtagacgtctctctggtcagcctggtggccaacaccctgggctttgccgagatgggccccatcaagtcactgcggacgctgcgtgcactccgtcctctgagagctctgtcacgatttgagggcatgagggtggtggtcaatgccctggtgggcgccatcccgtccatcatgaacgtcctcctcgtctgcctcatcttctggctcatcttcagcatcatgggcgtgaacctctttgcggggaagtttgggaggtgcatcaaccagacagagggagacttgcctttgaactacaccatcgtgaacaacaagagccagtgtgagtccttgaacttgaccggagaattgtactggaccaaggtgaaagtcaactttgacaacgtgggggccgggtacctggcccttctgcaggtggcaacatttaaaggctggatggacattatgtatgcagctgtggactccagggggtatgaagagcagcctcagtgggaatacaacctctacatgtacatctattttgtcattttcatcatctttgggtctttcttcaccctgaacctctttattggtgtcatcattgacaacttcaaccaacagaagaaaaagttagggggccaggacatcttcatgacagaggagcagaagaagtactacaatgccatgaagaagctgggctccaagaagccccagaagcccatcccacggcccctgaacaagtaccagggcttcatattcgacattgtgaccaagcaggcctttgacgtcaccatcatgtttctgatctgcttgaatatggtgaccatgatggtggagacagatgaccaaagtcctgagaaaatcaacatcttggccaagatcaacctgctctttgtggccatcttcacaggcgagtgtattgtcaagctggctgccctgcgccactactacttcaccaacagctggaatatcttcgacttcgtggttgtcatcctctccatcgtgggcactgtgctctcggacatcatccagaagtacttcttctccccgacgctcttccgagtcatccgcctggcccgaataggccgcatcctcagactgatccgaggggccaaggggatccgcacgctgctctttgccctcatgatgtccctgcctgccctcttcaacatcgggctgctgctcttcctcgtcatgttcatctactccatctttggcatggccaacttcgcttatgtcaagtgggaggctggcatcgacgacatgttcaacttccagaccttcgccaacagcatgctgtgcctcttccagatcaccacgtcggccggctgggatggcctcctcagccccatcctcaacactgggccgccctactgcgaccccactctgcccaacagcaatggctctcggggggactgcgggagcccagccgtgggcatcctcttcttcaccacctacatcatcatctccttcctcatcgtggtcaacatgtacattgccatcatcctggagaacttcagcgtggccacggaggagagcaccgagcccctgagtgaggacgacttcgatatgttctatgagatctgggagaaatttgacccagaggccactcagtttattgagtattcggtcctgtctgactttgccgatgccctgtctgagccactccgtatcgccaagcccaaccagataagcctcatcaacatggacctgcccatggtgagtggggaccgcatccattgcatggacattctctttgccttcaccaaaagggtcctgggggagtctggggagatggacgccctgaagatccagatggaggagaagttcatggcagccaacccatccaagatctcctacgagcccatcaccaccacactccggcgcaagcacgaagaggtgtcggccatggttatccagagagccttccgcaggcacctgctgcaacgctctttgaagcatgcctccttcctcttccgtcagcaggcgggcagcggcctctccgaagaggatgcccctgagcgagagggcctcatcgcctacgtgatgagtgagaacttctcccgaccccttggcccaccctccagctcctccatctcctccacttccttcccaccctcctatgacagtgtcactagagccaccagcgataacctccaggtgcgggggtctgactacagccacagtgaagatctcgccgacttccccccttctccggacagggaccgtgagtccatcgtgtga

SEQ ID NO: 1043 - DNA, 6048 bp, Artificial Sequence
  Description of Artificial Sequence: Synthetic polynucleotide
atggcaaacttcctattacctcggggcaccagcagcttccgcaggttcacacgggagtccctggcagccatcgagaagcgcatggcagagaagcaagcccgcggctcaaccaccttgcaggagagccgagaggggctgcccgaggaggaggctccccggccccagctggacctgcaggcctccaaaaagctgccagatctctatggcaatccaccccaagagctcatcggagagcccctggaggacctggaccccttctatagcacccaaaagactttcatcgtactgaataaaggcaagaccatcttccggttcagtgccaccaacgccttgtatgtcctcagtcccttccaccccatccggagagcggctgtgaagattctcgtacattccctgtttaatatgctgattatgtgcaccatcctcaccaactgcgtgttcatggcccagcacgaccctccaccctggaccaagtatgtcgagtacaccttcaccgccatttacacctttgagtctctggtcaagattctggctcgaggcttctgcctgcacgcgttcactttccttcgggacccatggaactggctggactttagtgtgattatcatggcatacacaactgaatttgtggacctgggcaatgtctcagccttacgcaccttccgagtcctccgggccctgaaaactatatcagtcatttcagggctgaagaccatcgtgggggccctgatccagtctgtgaagaagctggctgatgtgatggtcctcacagtcttctgcctcagcgtctttgccctcatcggcctgcagctcttcatgggcaacctaaggcacaagtgcgtgcgcaacttcacagcgctcaacggcaccaacggctccgtggaggccgacggcttggtctgggaatccctggacctttacctcagtgatccagaaaattacctgctcaagaacggcacctctgatgtgttactgtgtgggaacagctctgacgctgggacatgtccggagggctaccggtgcctaaaggcaggcgagaaccccgaccacggctacaccagcttcgattcctttgcctgggcctttcttgcactcttccgcctgatgacgcaggactgctgggagcgcctctatcagcagaccctcaggtccgcagggaagatctacatgatcttcttcatgcttgtcatcttcctggggtccttctacctggtgaacctgatcctggccgtggtcgcaatggcctatgaggagcaaaaccaagccaccatcgctgagaccgaggagaaggaaaagcgcttccaggaggccatggaaatgctcaagaaagaacacgaggccctcaccatcaggggtgtggataccgtgtcccgtagctccttggagatgtcccctttggccccagtaaacagccatgagagaagaagcaagaggagaaaacggatgtcttcaggaactgaggagtgtggggaggacaggctccccaagtctgactcagaagatggtcccagagcaatgaatcatctcagcctcacccgtggcctcagcaggacttctatgaagccacgttccagccgcgggagcattttcacctttcgcaggcgagacctgggttctgaagcagattttgcagatgatgaaaacagcacagcgggggagagcgagagccaccacacatcactgctggtgccctggcccctgcgccggaccagtgcccagggacagcccagtcccggaacctcggctcctggccacgccctccatggcaaaaagaacagcactgtggactgcaatggggtggtctcattactgggggcaggcgacccagaggccacatccccaggaagccacctcctccgccctgtgatgctagagcacccgccagacacgaccacgccatcggaggagccaggcgggccccagatgctgacctcccaggctccgtgtgtagatggcttcgaggagccaggagcacggcagcgggccctcagcgcagtcagcgtcctcaccagcgcactggaagagttagaggagtctcgccacaagtgtccaccatgctggaaccgtctcgcccagcgctacctgatctgggagtgctgcccgctgtggatgtccatcaagcagggagtgaagttggtggtcatggacccgtttactgacctcaccatcactatgtgcatcgtactcaacacactcttcatggcgctggagcactacaacatgacaagtgaattcgaggagatgctgcaggtcggaaacctggtcttcacagggattttcacagcagagatgaccttcaagatcattgccctcgacccctactactacttccaacagggctggaacatcttcgacagcatcatcgtcatccttagcctcatggagctgggcctgtcccgcatgagcaacttgtcggtgctgcgctccttccgcctgctgcgggtcttcaagctggccaaatcatggcccaccctgaacacactcatcaagatcatcgggaactcagtgggggcactggggaacctgacactggtgctagccatcatcgtgttcatctttgctgtggtgggcatgcagctctttggcaagaactactcggagctgagggacagcgactcaggcctgctgcctcgctggcacatgatggacttctttcatgccttcctcatcatcttccgcatcctctgtggagagtggatcgagaccatgtgggactgcatggaggtgtcggggcagtcattatgcctgctggtcttcttgcttgttatggtcattggcaaccttgtggtcctgaatctcttcctggccttgctgctcagctccttcagtgcagacaacctcacagcccctgatgaggacagagagatgaacaacctccagctggccctggcccgcatccagaggggcctgcgctttgtcaagcggaccacctgggatttctgctgtggtctcctgcggcagcggcctcagaagcccgcagcccttgccgcccagggccagctgcccagctgcattgccaccccctactccccgccacccccagagacggagaaggtgcctcccacccgcaaggaaacacggtttgaggaaggcgagcaaccaggccagggcacccccggggatccagagcccgtgtgtgtgcccatcgctgtggccgagtcagacacagatgaccaagaagaagatgaggagaacagcctgggcacggaggaggagtccagcaagcaggaatcccagcctgtgtccggtggcccagaggcccctccggattccaggacctggagccaggtgtcagcgactgcctcctctgaggccgaggccagtgcatctcaggccgactggcggcagcagtggaaagcggaaccccaggccccagggtgcggtgagaccccagaggacagttgctccgagggcagcacagcagacatgaccaacaccgctgagctcctggagcagatccctgacctcggccaggatgtcaaggacccagaggactgcttcactgaaggctgtgtccggcgctgtccctgctgtgcggtggacaccacacaggccccagggaaggtctggtggcggttgcgcaagacctgctaccacatcgtggagcacagctggttcgagacattcatcatcttcatgatcctactcagcagtggagcgctggccttcgaggacatctacctagaggagcggaagaccatcaaggttctgcttgagtatgccgacaagatgttcacatatgtcttcgtgctggagatgctgctcaagtgggtggcctacggcttcaagaagtacttcaccaatgcctggtgctggctcgacttcctcatcgtagacgtctctctggtcagcctggtggccaacaccctgggctttgccgagatgggccccatcaagtcactgcggacgctgcgtgcactccgtcctctgagagctctgtcacgatttgagggcatgagggtggtggtcaatgccctggtgggcgccatcccgtccatcatgaacgtcctcctcgtctgcctcatcttctggctcatcttcagcatcatgggcgtgaacctctttgcggggaagtttgggaggtgcatcaaccagacagagggagacttgcctttgaactacaccatcgtgaacaacaagagccagtgtgagtccttgaacttgaccggagaattgtactggaccaaggtgaaagtcaactttgacaacgtgggggccgggtacctggcccttctgcaggtggcaacatttaaaggctggatggacattatgtatgcagctgtggactccagggggtatgaagagcagcctcagtgggaatacaacctctacatgtacatctattttgtcattttcatcatctttgggtctttcttcaccctgaacctctttattggtgtcatcattgacaacttcaaccaacagaagaaaaagttagggggccaggacatcttcatgacagaggagcagaagaagtactacaatgccatgaagaagctgggctccaagaagccccagaagcccatcccacggcccctgaacaagtaccagggcttcatattcgacattgtgaccaagcaggcctttgacgtcaccatcatgtttctgatctgcttgaatatggtgaccatgatggtggagacagatgaccaaagtcctgagaaaatcaacatcttggccaagatcaacctgctctttgtggccatcttcacaggcgagtgtattgtcaagctggctgccctgcgccactactacttcaccaacagctggaatatcttcgacttcgtggttgtcatcctctccatcgtgggcactgtgctctcggacatcatccagaagtacttcttctccccgacgctcttccgagtcatccgcctggcccgaataggccgcatcctcagactgatccgaggggccaaggggatccgcacgctgctctttgccctcatgatgtccctgcctgccctcttcaacatcgggctgctgctcttcctcgtcatgttcatctactccatctttggcatggccaacttcgcttatgtcaagtgggaggctggcatcgacgacatgttcaacttccagaccttcgccaacagcatgctgtgcctcttccagatcaccacgtcggccggctgggatggcctcctcagccccatcctcaacactgggccgccctactgcgaccccactctgcccaacagcaatggctctcggggggactgcgggagcccagccgtgggcatcctcttcttcaccacctacatcatcatctccttcctcatcgtggtcaacatgtacattgccatcatcctggagaacttcagcgtggccacggaggagagcaccgagcccctgagtgaggacgacttcgatatgttctatgagatctgggagaaatttgacccagaggccactcagtttattgagtattcggtcctgtctgactttgccgatgccctgtctgagccactccgtatcgccaagcccaaccagataagcctcatcaacatggacctgcccatggtgagtggggaccgcatccattgcatggacattctctttgccttcaccaaaagggtcctgggggagtctggggagatggacgccctgaagatccagatggaggagaagttcatggcagccaacccatccaagatctcctacgagcccatcaccaccacactccggcgcaagcacgaagaggtgtcggccatggttatccagagagccttccgcaggcacctgctgcaacgctctttgaagcatgcctccttcctcttccgtcagcaggcgggcagcggcctctccgaagaggatgcccctgagcgagagggcctcatcgcctacgtgatgagtgagaacttctcccgaccccttggcccaccctccagctcctccatctcctccacttccttcccaccctcctatgacagtgtcactagagccaccagcgataacctccaggtgcgggggtctgactacagccacagtgaagatctcgccgacttccccccttctccggacagggaccgtgagtccatcgtgtga

SEQ ID NO: 1044 - protein, 2015 aa, Homo sapiens [sequence omitted]

SEQ ID NO: 1045 - DNA, 21 bp, Homo sapiens
gcctgggcggcccctccatca

SEQ ID NO: 1046 - DNA, 21 bp, Homo sapiens
tctctcccaacaccaactcag

SEQ ID NO: 1047 - DNA, 11 bp, Homo sapiens
ctccttcctca

SEQ ID NO: 1048 - DNA, 19 bp, Homo sapiens
gtggacttcacttacaggt

SEQ ID NO: 1049 - DNA, 19 bp, Artificial Sequence
  Description of Artificial Sequence: Synthetic oligonucleotide
gcggtctacatttgcaagt

SEQ ID NO: 1050 - DNA, 29 bp, Homo sapiens
gggagggagaggatctgtccaagaagaat

SEQ ID NO: 1051 - DNA, 29 bp, Artificial Sequence
  Description of Artificial Sequence: Synthetic oligonucleotide
gcgaaggtgaagacctctcgaaaaaaaac

SEQ ID NO: 1052 - DNA, 25 bp, Homo sapiens
gagggagaggatctgtccaagaaga

SEQ ID NO: 1053 - DNA, 25 bp, Artificial Sequence
  Description of Artificial Sequence: Synthetic oligonucleotide
gaaggtgaagacctctcgaaaaaaa

SEQ ID NO: 1054 - DNA, 25 bp, Homo sapiens
gggagaggatctgtccaagaagaat

SEQ ID NO: 1055 - DNA, 25 bp, Artificial Sequence
  Description of Artificial Sequence: Synthetic oligonucleotide
aggtgaagacctctcgaaaaaaaac

SEQ ID NO: 1056 - DNA, 21 bp, Homo sapiens
gaggatctgtccaagaagaat

SEQ ID NO: 1057 - DNA, 21 bp, Artificial Sequence
  Description of Artificial Sequence: Synthetic oligonucleotide
gaagacctctcgaaaaaaaac

SEQ ID NO: 1058 - DNA, 19 bp, Homo sapiens
gaggatctgtccaagaaga

SEQ ID NO: 1059 - DNA, 19 bp, Artificial Sequence
  Description of Artificial Sequence: Synthetic oligonucleotide
gaagacctctcgaaaaaaa

SEQ ID NO: 1060 - DNA, 19 bp, Homo sapiens
ggatctgtccaagaagaat

SEQ ID NO: 1061 - DNA, 19 bp, Artificial Sequence
  Description of Artificial Sequence: Synthetic oligonucleotide
agacctctcgaaaaaaaac

SEQ ID NO: 1062 - DNA, 28 bp, Homo sapiens
gtccaagaagaatccaattgccaagata

SEQ ID NO: 1063 - DNA, 28 bp, Artificial Sequence
  Description of Artificial Sequence: Synthetic oligonucleotide
ctcgaaaaaaaaccctatagcgaaaatt

SEQ ID NO: 1064 - DNA, 19 bp, Homo sapiens
gaatccaattgccaagata

SEQ ID NO: 1065 - DNA, 19 bp, Artificial Sequence
  Description of Artificial Sequence: Synthetic oligonucleotide
aaaccctatagcgaaaatt

SEQ ID NO: 1066 - DNA, 21 bp, Homo sapiens
gcagaagaaagaggactcaaa

SEQ ID NO: 1067 - DNA, 21 bp, Artificial Sequence
  Description of Artificial Sequence: Synthetic oligonucleotide
gctgaggagaggggtctgaag

SEQ ID NO: 1068 - DNA, 19 bp, Homo sapiens
gcagaagaaagaggactca

SEQ ID NO: 1069 - DNA, 19 bp, Artificial Sequence
  Description of Artificial Sequence: Synthetic oligonucleotide
gctgaggagaggggtctga

SEQ ID NO: 1070 - DNA, 19 bp, Homo sapiens
ggagaactgaatgttacca

SEQ ID NO: 1071 - DNA, 19 bp, Artificial Sequence
  Description of Artificial Sequence: Synthetic oligonucleotide
ggtgagctcaacgtaacga

SEQ ID NO: 1072 - DNA, 21 bp, Homo sapiens
ggatgcaagaggaaacaatgt

SEQ ID NO: 1073 - DNA, 21 bp, Artificial Sequence
  Description of Artificial Sequence: Synthetic oligonucleotide
agacgctaggggtaataacgt

SEQ ID NO: 1074 - DNA, 19 bp, Homo sapiens
ggatgcaagaggaaacaat

SEQ ID NO: 1075 - DNA, 19 bp, Artificial Sequence
  Description of Artificial Sequence: Synthetic oligonucleotide
agacgctaggggtaataac

SEQ ID NO: 1076 - DNA, 25 bp, Homo sapiens
gatgcaagaggaaacaatgtagaga

SEQ ID NO: 1077 - DNA, 25 bp, Artificial Sequence
  Description of Artificial Sequence: Synthetic oligonucleotide
gacgctaggggtaataacgttgaaa

SEQ ID NO: 1078 - DNA, 21 bp, Homo sapiens
gatgcaagaggaaacaatgta

SEQ ID NO: 1079 - DNA, 21 bp, Artificial Sequence
  Description of Artificial Sequence: Synthetic oligonucleotide
gacgctaggggtaataacgtt

SEQ ID NO: 1080 - DNA, 19 bp, Homo sapiens
gaggaaacaatgtagagaa

SEQ ID NO: 1081 - DNA, 19 bp, Artificial Sequence
  Description of Artificial Sequence: Synthetic oligonucleotide
ggggtaataacgttgaaaa

SEQ ID NO: 1082 - DNA, 29 bp, Homo sapiens
gttctacctaaataaagatacaggagaga

SEQ ID NO: 1083 - DNA, 29 bp, Artificial Sequence
  Description of Artificial Sequence: Synthetic oligonucleotide
cttttatcttaacaaggacactggtgaaa

SEQ ID NO: 1084 - DNA, 19 bp, Homo sapiens
gtgttaccttggacagaga

SEQ ID NO: 1085 - DNA, 19 bp, Artificial Sequence
  Description of Artificial Sequence: Synthetic oligonucleotide
gcgtaacgttagataggga

SEQ ID NO: 1086 - DNA, 21 bp, Homo sapiens
gatgcagatgaaataggttct

SEQ ID NO: 1087 - DNA, 21 bp, Artificial Sequence
  Description of Artificial Sequence: Synthetic oligonucleotide
gacgctgacgagattggatca

SEQ ID NO: 1088 - DNA, 19 bp, Homo sapiens
gatgcagatgaaataggtt

SEQ ID NO: 1089 - DNA, 19 bp, Artificial Sequence
  Description of Artificial Sequence: Synthetic oligonucleotide
gacgctgacgagattggat

SEQ ID NO: 1090 - DNA, 19 bp, Homo sapiens
gatgaaataggttctgata

SEQ ID NO: 1091 - DNA, 19 bp, Artificial Sequence
  Description of Artificial Sequence: Synthetic oligonucleotide
gacgagattggatcagaca

SEQ ID NO: 1092 - DNA, 21 bp, Homo sapiens
ggaggttatttccacatagaa

SEQ ID NO: 1093 - DNA, 21 bp, Artificial Sequence
  Description of Artificial Sequence: Synthetic oligonucleotide
ggtggatactttcatattgag

SEQ ID NO: 1094 - DNA, 19 bp, Homo sapiens
gaggttatttccacataga

SEQ ID NO: 1095 - DNA, 19 bp, Artificial Sequence
  Description of Artificial Sequence: Synthetic oligonucleotide
gtggatactttcatattga

SEQ ID NO: 1096 - DNA, 19 bp, Homo sapiens
gaaacagatgctcaaacta

SEQ ID NO: 1097 - DNA, 19 bp, Artificial Sequence
  Description of Artificial Sequence: Synthetic oligonucleotide
gagactgacgcacagacaa

SEQ ID NO: 1098 - DNA, 21 bp, Homo sapiens
gttagcgagagcatggataga

SEQ ID NO: 1099 - DNA, 21 bp, Artificial Sequence
  Description of Artificial Sequence: Synthetic oligonucleotide
gtaagtgaaagtatggacagg

SEQ ID NO: 1100 - DNA, 21 bp, Homo sapiens
gatcaagcaaaggccaaataa

SEQ ID NO: 1101 - DNA, 21 bp, Artificial Sequence
  Description of Artificial Sequence: Synthetic oligonucleotide
ggtctagtaaggggcagatta

SEQ ID NO: 1102 - DNA, 29 bp, Homo sapiens
gtggccatatcagaagattatcctagaaa

SEQ ID NO: 1103 - DNA, 29 bp, Artificial Sequence
  Description of Artificial Sequence: Synthetic oligonucleotide
gtcgcgatttctgaggactacccaaggaa

SEQ ID NO: 1104 - DNA, 21 bp, Homo sapiens
gtggccatatcagaagattat

SEQ ID NO: 1105 - DNA, 21 bp, Artificial Sequence
  Description of Artificial Sequence: Synthetic oligonucleotide
gtcgcgatttctgaggactac

SEQ ID NO: 1106 - DNA, 19 bp, Homo sapiens
gtggccatatcagaagatt

SEQ ID NO: 1107 - DNA, 19 bp, Artificial Sequence
  Description of Artificial Sequence: Synthetic oligonucleotide
gtcgcgatttctgaggact

SEQ ID NO: 1108 - DNA, 25 bp, Homo sapiens
ggccatatcagaagattatcctaga

SEQ ID NO: 1109 - DNA, 25 bp, Artificial Sequence
  Description of Artificial Sequence: Synthetic oligonucleotide
cgcgatttctgaggactacccaagg

SEQ ID NO: 1110 - DNA, 19 bp, Homo sapiens
ggccatatcagaagattat

SEQ ID NO: 1111 - DNA, 19 bp, Artificial Sequence
  Description of Artificial Sequence: Synthetic oligonucleotide
cgcgatttctgaggactac

SEQ ID NO: 1112 - DNA, 25 bp, Homo sapiens
gccatatcagaagattatcctagaa

SEQ ID NO: 1113 - DNA, 25 bp, Artificial Sequence
  Description of Artificial Sequence: Synthetic oligonucleotide
gcgatttctgaggactacccaagga

SEQ ID NO: 1114 - DNA, 21 bp, Homo sapiens
gccatatcagaagattatcct

SEQ ID NO: 1115 - DNA, 21 bp, Artificial Sequence
  Description of Artificial Sequence: Synthetic oligonucleotide
gcgatttctgaggactaccca

SEQ ID NO: 1116 - DNA, 21 bp, Homo sapiens
ggcacagtccttatcaatgtt

SEQ ID NO: 1117 - DNA, 21 bp, Artificial Sequence
  Description of Artificial Sequence: Synthetic oligonucleotide
gggactgtgctaattaacgta

SEQ ID NO: 1118 - DNA, 19 bp, Homo sapiens
gcacagtccttatcaatgt

SEQ ID NO: 1119 - DNA, 19 bp, Artificial Sequence
  Description of Artificial Sequence: Synthetic oligonucleotide
ggactgtgctaattaacgt

SEQ ID NO: 1120 - DNA, 19 bp, Homo sapiens
ggatggacacccaaacagt

SEQ ID NO: 1121 - DNA, 19 bp, Artificial Sequence
  Description of Artificial Sequence: Synthetic oligonucleotide
cgacggtcatcctaatagc

SEQ ID NO: 1122 - DNA, 21 bp, Homo sapiens
gctgctgcaacaaagtgagaa

SEQ ID NO: 1123 - DNA, 21 bp, Artificial Sequence
  Description of Artificial Sequence: Synthetic oligonucleotide
cctcctccagcagagcgaaaa

SEQ ID NO: 1124 - DNA, 19 bp, Homo sapiens
gctgcaacaaagtgagaaa

SEQ ID NO: 1125 - DNA, 19 bp, Artificial Sequence
  Description of Artificial Sequence: Synthetic oligonucleotide
cctccagcagagcgaaaag

SEQ ID NO: 1126 - DNA, 25 bp, Homo sapiens
gggaagcacagcatgactcctatgt

SEQ ID NO: 1127 - DNA, 25 bp, Artificial Sequence
  Description of Artificial Sequence: Synthetic oligonucleotide
gagaggctcaacacgattcgtacgt

SEQ ID NO: 1128 - DNA, 21 bp, Homo sapiens
ggaagcacagcatgactccta

SEQ ID NO: 1129 - DNA, 21 bp, Artificial Sequence
  Description of Artificial Sequence: Synthetic oligonucleotide
agaggctcaacacgattcgta

SEQ ID NO: 1130 - DNA, 21 bp, Homo sapiens
gaagcacagcatgactcctat

SEQ ID NO: 1131 - DNA, 21 bp, Artificial Sequence
  Description of Artificial Sequence: Synthetic oligonucleotide
gaggctcaacacgattcgtac

SEQ ID NO: 1132 - DNA, 19 bp, Homo sapiens
gaagcacagcatgactcct

SEQ ID NO: 1133 - DNA, 19 bp, Artificial Sequence
  Description of Artificial Sequence: Synthetic oligonucleotide
gaggctcaacacgattcgt

SEQ ID NO: 1134 - DNA, 21 bp, Homo sapiens
gctgcatccttggaataatga

SEQ ID NO: 1135 - DNA, 21 bp, Artificial Sequence
  Description of Artificial Sequence: Synthetic oligonucleotide
gctccacccatggaacaacga

SEQ ID NO: 1136 - DNA, 19 bp, Homo sapiens
gctgcatccttggaataat

SEQ ID NO: 1137 - DNA, 19 bp, Artificial Sequence
  Description of Artificial Sequence: Synthetic oligonucleotide
gctccacccatggaacaac

SEQ ID NO: 1138 - DNA, 19 bp, Homo sapiens
gcatccttggaataatgaa

SEQ ID NO: 1139 - DNA, 19 bp, Artificial Sequence
  Description of Artificial Sequence: Synthetic oligonucleotide
ccacccatggaacaacgag

SEQ ID NO: 1140 - DNA, 19 bp, Homo sapiens
gagcaccacctgaagacaa

SEQ ID NO: 1141 - DNA, 19 bp, Artificial Sequence
  Description of Artificial Sequence: Synthetic oligonucleotide
gtgctcctccagaggataa

SEQ ID NO: 1142 - DNA, 25 bp, Homo sapiens
gccatcatttctgccagtggatcaa

SEQ ID NO: 1143 - DNA, 25 bp, Artificial Sequence
  Description of Artificial Sequence: Synthetic oligonucleotide
cccttctttcctccctgtcgaccag

SEQ ID NO: 1144 - DNA, 21 bp, Homo sapiens
gccatcatttctgccagtgga

SEQ ID NO: 1145 - DNA, 21 bp, Artificial Sequence
  Description of Artificial Sequence: Synthetic oligonucleotide
cccttctttcctccctgtcga

SEQ ID NO: 1146 - DNA, 21 bp, Homo sapiens
gggcagtctagtaggaagaaa

SEQ ID NO: 1147 - DNA, 21 bp, Artificial Sequence
  Description of Artificial Sequence: Synthetic oligonucleotide
cgggagccttgttggtaggaa

SEQ ID NO: 1148 - DNA, 21 bp, Homo sapiens
ggcagtctagtaggaagaaat

SEQ ID NO: 1149 - DNA, 21 bp, Artificial Sequence
  Description of Artificial Sequence: Synthetic oligonucleotide
gggagccttgttggtaggaac

SEQ ID NO: 1150 - DNA, 29 bp, Homo sapiens
gcagtctagtaggaagaaatggagtagga

SEQ ID NO: 1151 - DNA, 29 bp, Artificial Sequence
  Description of Artificial Sequence: Synthetic oligonucleotide
ggagccttgttggtaggaacggtgttggt

SEQ ID NO: 1152 - DNA, 19 bp, Homo sapiens
gcagtctagtaggaagaaa

SEQ ID NO: 1153 - DNA, 19 bp, Artificial Sequence
  Description of Artificial Sequence: Synthetic oligonucleotide
ggagccttgttggtaggaa

SEQ ID NO: 1154 - DNA, 19 bp, Homo sapiens
gaaatggagtaggaggtat

SEQ ID NO: 1155 - DNA, 19 bp, Artificial Sequence
  Description of Artificial Sequence: Synthetic oligonucleotide
ggaacggtgttggtggaat

SEQ ID NO: 1156 - DNA, 21 bp, Homo sapiens
gccaaggaagccacgatgaaa

SEQ ID NO: 1157 - DNA, 21 bp, Artificial Sequence
  Description of Artificial Sequence: Synthetic oligonucleotide
gcgaaagaggcgaccatgaag

SEQ ID NO: 1158 - DNA, 25 bp, Homo sapiens
gaagccacgatgaaaggaagtagct

SEQ ID NO: 1159 - DNA, 25 bp, Artificial Sequence
  Description of Artificial Sequence: Synthetic oligonucleotide
gaggcgaccatgaagggtagcagtt

SEQ ID NO: 1160 - DNA, 25 bp, Homo sapiens
gctgctgttgcactgaacgaagaat

SEQ ID NO: 1161 - DNA, 25 bp, Artificial Sequence
  Description of Artificial Sequence: Synthetic oligonucleotide
gcagcagtagctctcaatgaggagt

SEQ ID NO: 1162 - DNA, 19 bp, Homo sapiens
gttgcactgaacgaagaat

SEQ ID NO: 1163 - DNA, 19 bp, Artificial Sequence
  Description of Artificial Sequence: Synthetic oligonucleotide
gtagctctcaatgaggagt

SEQ ID NO: 1164 - DNA, 21 bp, Homo sapiens
gaatcgctgaatgcttctatt

SEQ ID NO: 1165 - DNA, 21 bp, Artificial Sequence
  Description of Artificial Sequence: Synthetic oligonucleotide
gagtccctcaacgcatcaata

SEQ ID NO: 1166 - DNA, 19 bp, Homo sapiens
ggaaatagtcactgaaaga

SEQ ID NO: 1167 - DNA, 19 bp, Artificial Sequence
  Description of Artificial Sequence: Synthetic oligonucleotide
agagattgtgacagagagg

SEQ ID NO: 1168 - DNA, 21 bp, Homo sapiens
gaaatagtcactgaaagatct

SEQ ID NO: 1169 - DNA, 21 bp, Artificial Sequence
  Description of Artificial Sequence: Synthetic oligonucleotide
gagattgtgacagagaggtca

SEQ ID NO: 1170 - DNA, 19 bp, Homo sapiens
gaaatagtcactgaaagat

SEQ ID NO: 1171 - DNA, 19 bp, Artificial Sequence
  Description of Artificial Sequence: Synthetic oligonucleotide
gagattgtgacagagaggt

SEQ ID NO: 1172 - DNA, 19 bp, Homo sapiens
gaaatgtgatagcaacaga

SEQ ID NO: 1173 - DNA, 19 bp, Artificial Sequence
  Description of Artificial Sequence: Synthetic oligonucleotide
ggaacgtcattgctactga

SEQ ID NO: 1174 - DNA, 25 bp, Homo sapiens
gatcgaatcctctggaaggcactca

SEQ ID NO: 1175 - DNA, 25 bp, Artificial Sequence
  Description of Artificial Sequence: Synthetic oligonucleotide
gttccaacccactcgaggggacaca

SEQ ID NO: 1176 - DNA, 21 bp, Homo sapiens
gaatcctctggaaggcactca

SEQ ID NO: 1177 - DNA, 21 bp, Artificial Sequence
  Description of Artificial Sequence: Synthetic oligonucleotide
caacccactcgaggggacaca

SEQ ID NO: 1178 - DNA, 21 bp, Homo sapiens
aaggcactcagcatcttcaag

SEQ ID NO: 1179 - DNA, 21 bp, Artificial Sequence
  Description of Artificial Sequence: Synthetic oligonucleotide
aggggacacaacacctacagg

SEQ ID NO: 1180 - DNA, 19 bp, Homo sapiens
gtgaaccaggagtttctga

SEQ ID NO: 1181 - DNA, 19 bp, Artificial Sequence
  Description of Artificial Sequence: Synthetic oligonucleotide
gtcaatcaagaattcctca

SEQ ID NO: 1182 - DNA, 29 bp, Homo sapiens
gagctcaatgaccgcttcgccaactacat

SEQ ID NO: 1183 - DNA, 29 bp, Artificial Sequence
  Description of Artificial Sequence: Synthetic oligonucleotide
gaactgaacgatcggtttgcgaattatat

SEQ ID NO: 1184 - DNA, 25 bp, Homo sapiens
gttgaaggaagaagcagagaacaat

SEQ ID NO: 1185 - DNA, 25 bp, Artificial Sequence
  Description of Artificial Sequence: Synthetic oligonucleotide
attaaaagaggaggctgaaaataac

SEQ ID NO: 1186 - DNA, 21 bp, Homo sapiens
gttgaaggaagaagcagagaa

SEQ ID NO: 1187 - DNA, 21 bp, Artificial Sequence
  Description of Artificial Sequence: Synthetic oligonucleotide
attaaaagaggaggctgaaaa

SEQ ID NO: 1188 - DNA, 21 bp, Homo sapiens
gaaggaagaagcagagaacaa

SEQ ID NO: 1189 - DNA, 21 bp, Artificial Sequence
  Description of Artificial Sequence: Synthetic oligonucleotide
aaaagaggaggctgaaaataa

SEQ ID NO: 1190 - DNA, 21 bp, Homo sapiens
ggaagaagcagagaacaattt

SEQ ID NO: 1191 - DNA, 21 bp, Artificial Sequence
  Description of Artificial Sequence: Synthetic oligonucleotide
agaggaggctgaaaataactt

SEQ ID NO: 1192 - DNA, 19 bp, Homo sapiens
ggaagaagcagagaacaat

SEQ ID NO: 1193 - DNA, 19 bp, Artificial Sequence
  Description of Artificial Sequence: Synthetic oligonucleotide
agaggaggctgaaaataac

SEQ ID NO: 1194 - DNA, 21 bp, Homo sapiens
ggagcgcagaattgaatctct

SEQ ID NO: 1195 - DNA, 21 bp, Artificial Sequence
  Description of Artificial Sequence: Synthetic oligonucleotide
cgaacggaggatagagtcact

SEQ ID NO: 1196 - DNA, 19 bp, Homo sapiens
ggagcgcagaattgaatct

SEQ ID NO: 1197 - DNA, 19 bp, Artificial Sequence
  Description of Artificial Sequence: Synthetic oligonucleotide
cgaacggaggatagagtca

SEQ ID NO: 1198 - DNA, 21 bp, Homo sapiens
gaaagtgcatgaagaggagat

SEQ ID NO: 1199 - DNA, 21 bp, Artificial Sequence
  Description of Artificial Sequence: Synthetic oligonucleotide
aaaggtccacgaggaagaaat

SEQ ID NO: 1200 - DNA, 29 bp, Homo sapiens
gaacatttctgaagctgaggagtggtaca

SEQ ID NO: 1201 - DNA, 29 bp, Artificial Sequence
  Description of Artificial Sequence: Synthetic oligonucleotide
aaatatatcagaggcagaagaatggtata

SEQ ID NO: 1202 - DNA, 19 bp, Homo sapiens
gaagctgaggagtggtaca

SEQ ID NO: 1203 - DNA, 19 bp, Artificial Sequence
  Description of Artificial Sequence: Synthetic oligonucleotide
gaggcagaagaatggtata

SEQ ID NO: 1204 - DNA, 19 bp, Homo sapiens
gctgaggagtggtacaagt

SEQ ID NO: 1205 - DNA, 19 bp, Artificial Sequence
  Description of Artificial Sequence: Synthetic oligonucleotide
gcagaagaatggtataaat

SEQ ID NO: 1206 - DNA, 29 bp, Homo sapiens
ggaataccgacaccagatccagtcctaca

SEQ ID NO: 1207 - DNA, 29 bp, Artificial Sequence
  Description of Artificial Sequence: Synthetic oligonucleotide
ggagtatcgtcatcaaattcaatcgtata

SEQ ID NO: 1208 - DNA, 21 bp, Homo sapiens
gacaccagatccagtcctaca

SEQ ID NO: 1209 - DNA, 21 bp, Artificial Sequence
  Description of Artificial Sequence: Synthetic oligonucleotide
gtcatcaaattcaatcgtata

SEQ ID NO: 1210 - DNA, 21 bp, Homo sapiens
gtcctacacctgcgagattga

SEQ ID NO: 1211 - DNA, 21 bp, Artificial Sequence
  Description of Artificial Sequence: Synthetic oligonucleotide
atcgtatacgtgtgaaataga

SEQ ID NO: 1212 - DNA, 21 bp, Homo sapiens
gcactaacgattccctgatga

SEQ ID NO: 1213 - DNA, 21 bp, Artificial Sequence
  Description of Artificial Sequence: Synthetic oligonucleotide
ggacaaatgactcgctcatga

SEQ ID NO: 1214 - DNA, 19 bp, Homo sapiens
gtggctaccaggacaacat

SEQ ID NO: 1215 - DNA, 19 bp, Artificial Sequence
  Description of Artificial Sequence: Synthetic oligonucleotide
gcgggtatcaagataatat

SEQ ID NO: 1216 - DNA, 21 bp, Homo sapiens
gacctactctgccctcaactt

SEQ ID NO: 1217 - DNA, 21 bp, Artificial Sequence
  Description of Artificial Sequence: Synthetic oligonucleotide
aacgtattcagcgctgaattt

SEQ ID NO: 1218 - DNA, 19 bp, Homo sapiens
ggttctgaggtccatacca

SEQ ID NO: 1219 - DNA, 19 bp, Artificial Sequence
  Description of Artificial Sequence: Synthetic oligonucleotide
ggatcagaagtgcacacga

SEQ ID NO: 1220 - DNA, 29 bp, Homo sapiens
gaggtccataccaagaagacggtgatgat

SEQ ID NO: 1221 - DNA, 29 bp, Artificial Sequence
  Description of Artificial Sequence: Synthetic oligonucleotide
gaagtgcacacgaaaaaaaccgtcatgat

SEQ ID NO: 1222 - DNA, 19 bp, Homo sapiens
gaggtccataccaagaaga

SEQ ID NO: 1223 - DNA, 19 bp, Artificial Sequence
  Description of Artificial Sequence: Synthetic oligonucleotide
gaagtgcacacgaaaaaaa

SEQ ID NO: 1224 - DNA, 25 bp, Homo sapiens
gtccataccaagaagacggtgatga

SEQ ID NO: 1225 - DNA, 25 bp, Artificial Sequence
  Description of Artificial Sequence: Synthetic oligonucleotide
gtgcacacgaaaaaaaccgtcatga

SEQ ID NO: 1226 - DNA, 29 bp, Homo sapiens
gaaccaaccgctacagcatcgtctcttca

SEQ ID NO: 1227 - DNA, 29 bp, Artificial Sequence
  Description of Artificial Sequence: Synthetic oligonucleotide
gtacgaatcggtatagtattgtgtcatct

SEQ ID NO: 1228 - DNA, 29 bp, Homo sapiens
gggaagagtaaagtccacacccgacaaca

SEQ ID NO: 1229 - DNA, 29 bp, Artificial Sequence
  Description of Artificial Sequence: Synthetic oligonucleotide
ggcaaaagcaaggtgcatacgcgtcagca

SEQ ID NO: 1230 - DNA, 29 bp, Homo sapiens
gaagagtaaagtccacacccgacaacagt

SEQ ID NO: 1231 - DNA, 29 bp, Artificial Sequence
  Description of Artificial Sequence: Synthetic oligonucleotide
caaaagcaaggtgcatacgcgtcagcaat

SEQ ID NO: 1232 - DNA, 28 bp, Homo sapiens
gcacagctcctcaaatccagaattactt

SEQ ID NO: 1233 - DNA, 28 bp, Artificial Sequence
  Description of Artificial Sequence: Synthetic oligonucleotide
gctcaactgctgaagtcgaggataacat

SEQ ID NO: 1234 - DNA, 19 bp, Homo sapiens
ggatcaaatagacatcaat

SEQ ID NO: 1235 - DNA, 19 bp, Artificial Sequence
  Description of Artificial Sequence: Synthetic oligonucleotide
cgaccagattgatattaac

SEQ ID NO: 1236 - DNA, 19 bp, Homo sapiens
ggtgtccccaatcactata

SEQ ID NO: 1237 - DNA, 19 bp, Artificial Sequence
  Description of Artificial Sequence: Synthetic oligonucleotide
cgtctcgcctattacaatt

SEQ ID NO: 1238 - DNA, 29 bp, Homo sapiens
gaaatagatgaagacagtcctttatatga

SEQ ID NO: 1239 - DNA, 29 bp, Artificial Sequence
  Description of Artificial Sequence: Synthetic oligonucleotide
gagattgacgaggatagcccattgtacga

SEQ ID NO: 1240 - DNA, 21 bp, Homo sapiens
gatgaagacagtcctttatat

SEQ ID NO: 1241 - DNA, 21 bp, Artificial Sequence
  Description of Artificial Sequence: Synthetic oligonucleotide
gacgaggatagcccattgtac

SEQ ID NO: 1242 - DNA, 21 bp, Homo sapiens
gaagacagtcctttatatgat

SEQ ID NO: 1243 - DNA, 21 bp, Artificial Sequence
  Description of Artificial Sequence: Synthetic oligonucleotide
gaggatagcccattgtacgac

SEQ ID NO: 1244 - DNA, 29 bp, Homo sapiens
gtgccgtagctcttatctagcaaatgaaa

SEQ ID NO: 1245 - DNA, 29 bp, Artificial Sequence
  Description of Artificial Sequence: Synthetic oligonucleotide
atgtcgaagttcataccttgctaacgaga

SEQ ID NO: 1246 - DNA, 19 bp, Homo sapiens
gaagagaagcactactaca

SEQ ID NO: 1247 - DNA, 19 bp, Artificial Sequence
  Description of Artificial Sequence: Synthetic oligonucleotide
gaggaaaaacattattata

SEQ ID NO: 1248 - DNA, 21 bp, Homo sapiens
aagcactactacaaagtggac

SEQ ID NO: 1249 - DNA, 21 bp, Artificial Sequence
  Description of Artificial Sequence: Synthetic oligonucleotide
aaacattattataaggtcgat

SEQ ID NO: 1250 - DNA, 19 bp, Homo sapiens
gaggaagacgacagtgaaa

SEQ ID NO: 1251 - DNA, 19 bp, Artificial Sequence
  Description of Artificial Sequence: Synthetic oligonucleotide
gaagaggatgatagcgaga

SEQ ID NO: 1252 - DNA, 19 bp, Homo sapiens
gcgagagtcggagatatga

SEQ ID NO: 1253 - DNA, 19 bp, Artificial Sequence
  Description of Artificial Sequence: Synthetic oligonucleotide
ccgtgaatccgaaatttga

SEQ ID NO: 1254 - DNA, 21 bp, Homo sapiens
gggcttaatttccccacatat

SEQ ID NO: 1255 - DNA, 21 bp, Artificial Sequence
  Description of Artificial Sequence: Synthetic oligonucleotide
ggcctaaactttccgacttac

SEQ ID NO: 1256 - DNA, 21 bp, Homo sapiens
gcttaatttccccacatatga

SEQ ID NO: 1257 - DNA, 21 bp, Artificial Sequence
  Description of Artificial Sequence: Synthetic oligonucleotide
cctaaactttccgacttacga

SEQ ID NO: 1258 - DNA, 19 bp, Homo sapiens
gcttaatttccccacatat

SEQ ID NO: 1259 - DNA, 19 bp, Artificial Sequence
  Description of Artificial Sequence: Synthetic oligonucleotide
cctaaactttccgacttac

SEQ ID NO: 1260 - DNA, 28 bp, Homo sapiens
gatgggaaggaccgagtggtaagtcttt

SEQ ID NO: 1261 - DNA, 28 bp, Artificial Sequence
  Description of Artificial Sequence: Synthetic oligonucleotide
gacggcaaagatcgtgtcgttagcctat

SEQ ID NO: 1262 - DNA, 25 bp, Homo sapiens
gggaaggaccgagtggtaagtcttt

SEQ ID NO: 1263 - DNA, 25 bp, Artificial Sequence
  Description of Artificial Sequence: Synthetic oligonucleotide
ggcaaagatcgtgtcgttagcctat

SEQ ID NO: 1264 - DNA, 21 bp, Homo sapiens
gaaggaccgagtggtaagtct

SEQ ID NO: 1265 - DNA, 21 bp, Artificial Sequence
  Description of Artificial Sequence: Synthetic oligonucleotide
caaagatcgtgtcgttagcct

SEQ ID NO: 1266 - DNA, 19 bp, Homo sapiens
gaaggaccgagtggtaagt

SEQ ID NO: 1267 - DNA, 19 bp, Artificial Sequence
  Description of Artificial Sequence: Synthetic oligonucleotide
caaagatcgtgtcgttagc

SEQ ID NO: 1268 - DNA, 19 bp, Homo sapiens
ggaccgagtggtaagtctt

SEQ ID NO: 1269 - DNA, 19 bp, Artificial Sequence
  Description of Artificial Sequence: Synthetic oligonucleotide
agatcgtgtcgttagccta

SEQ ID NO: 1270 - DNA, 19 bp, Homo sapiens
gaccgagtggtaagtcttt

SEQ ID NO: 1271 - DNA, 19 bp, Artificial Sequence
  Description of Artificial Sequence: Synthetic oligonucleotide
gatcgtgtcgttagcctat

SEQ ID NO: 1272 - DNA, 21 bp, Homo sapiens
ggcccaggtccttgaacataa

SEQ ID NO: 1273 - DNA, 21 bp, Artificial Sequence
  Description of Artificial Sequence: Synthetic oligonucleotide
cgcgcaagtgctagagcacaa

SEQ ID NO: 1274 - DNA, 19 bp, Homo sapiens
gcccaggtccttgaacata

SEQ ID NO: 1275 - DNA, 19 bp, Artificial Sequence
  Description of Artificial Sequence: Synthetic oligonucleotide
gcgcaagtgctagagcaca

SEQ ID NO: 1276 - DNA, 21 bp, Homo sapiens
gtccttgaacataaagctata

SEQ ID NO: 1277 - DNA, 21 bp, Artificial Sequence
  Description of Artificial Sequence: Synthetic oligonucleotide
gtgctagagcacaaggcaatt

SEQ ID NO: 1278 - DNA, 19 bp, Homo sapiens
ggtggatgccaagaaagaa

SEQ ID NO: 1279 - DNA, 19 bp, Artificial Sequence
  Description of Artificial Sequence: Synthetic oligonucleotide
ggtcgacgcgaaaaaggag

SEQ ID NO: 1280 - DNA, 21 bp, Homo sapiens
gatgaagaaggaagcctgtat

SEQ ID NO: 1281 - DNA, 21 bp, Artificial Sequence
  Description of Artificial Sequence: Synthetic oligonucleotide
gacgaggagggtagtctctac

SEQ ID NO: 1282 - DNA, 21 bp, Homo sapiens
gaagaaggaagcctgtatatt

SEQ ID NO: 1283 - DNA, 21 bp, Artificial Sequence
  Description of Artificial Sequence: Synthetic oligonucleotide
gaggagggtagtctctacata

SEQ ID NO: 1284 - DNA, 19 bp, Homo sapiens
gaagaaggaagcctgtata

SEQ ID NO: 1285 - DNA, 19 bp, Artificial Sequence
  Description of Artificial Sequence: Synthetic oligonucleotide
gaggagggtagtctctaca

SEQ ID NO: 1286 - DNA, 21 bp, Homo sapiens
aaggaagcctgtatattctta

SEQ ID NO: 1287 - DNA, 21 bp, Artificial Sequence
  Description of Artificial Sequence: Synthetic oligonucleotide
agggtagtctctacatactaa

SEQ ID NO: 1288 - DNA, 19 bp, Homo sapiens
ggaagcctgtatattctta

SEQ ID NO: 1289 - DNA, 19 bp, Artificial Sequence
  Description of Artificial Sequence: Synthetic oligonucleotide
ggtagtctctacatactaa

SEQ ID NO: 1290 - DNA, 19 bp, Homo sapiens
gaagcctgtatattcttaa

SEQ ID NO: 1291 - DNA, 19 bp, Artificial Sequence
  Description of Artificial Sequence: Synthetic oligonucleotide
gtagtctctacatactaaa

SEQ ID NO: 1292 - DNA, 19 bp, Homo sapiens
ggtgatcgcacaatagagt

SEQ ID NO: 1293 - DNA, 19 bp, Artificial Sequence
  Description of Artificial Sequence: Synthetic oligonucleotide
ggagaccggactattgaat

SEQ ID NO: 1294 - DNA, 25 bp, Homo sapiens
ggtggagttcctcttggatctaatt

SEQ ID NO: 1295 - DNA, 25 bp, Artificial Sequence
  Description of Artificial Sequence: Synthetic oligonucleotide
agtcgaatttctgttagaccttata

SEQ ID NO: 1296 - DNA, 21 bp, Homo sapiens
gtggagttcctcttggatcta

SEQ ID NO: 1297 - DNA, 21 bp, Artificial Sequence
  Description of Artificial Sequence: Synthetic oligonucleotide
gtcgaatttctgttagacctt

SEQ ID NO: 1298 - DNA, 21 bp, Homo sapiens
ggagttcctcttggatctaat

SEQ ID NO: 1299 - DNA, 21 bp, Artificial Sequence
  Description of Artificial Sequence: Synthetic oligonucleotide
cgaatttctgttagaccttat

SEQ ID NO: 1300 - DNA, 19 bp, Homo sapiens
ggagttcctcttggatcta

SEQ ID NO: 1301 - DNA, 19 bp, Artificial Sequence
  Description of Artificial Sequence: Synthetic oligonucleotide
cgaatttctgttagacctt

SEQ ID NO: 1302 - DNA, 21 bp, Homo sapiens
gagttcctcttggatctaatt

SEQ ID NO: 1303 - DNA, 21 bp, Artificial Sequence
  Description of Artificial Sequence: Synthetic oligonucleotide
gaatttctgttagaccttata

SEQ ID NO: 1304 - DNA, 19 bp, Homo sapiens
gagttcctcttggatctaa

SEQ ID NO: 1305 - DNA, 19 bp, Artificial Sequence
  Description of Artificial Sequence: Synthetic oligonucleotide
gaatttctgttagacctta

SEQ ID NO: 1306 - DNA, 21 bp, Homo sapiens
gttcctcttggatctaattga

SEQ ID NO: 1307 - DNA, 21 bp, Artificial Sequence
  Description of Artificial Sequence: Synthetic oligonucleotide
atttctgttagaccttataga

SEQ ID NO: 1308 - DNA, 19 bp, Homo sapiens
gttcctcttggatctaatt

SEQ ID NO: 1309 - DNA, 19 bp, Artificial Sequence
  Description of Artificial Sequence: Synthetic oligonucleotide
atttctgttagaccttata

SEQ ID NO: 1310 - DNA, 19 bp, Homo sapiens
gaagacccagtggagatca

SEQ ID NO: 1311 - DNA, 19 bp, Artificial Sequence
  Description of Artificial Sequence: Synthetic oligonucleotide
gaggatcctgtcgaaatta

SEQ ID NO: 1312 - DNA, 19 bp, Homo sapiens
gacccagtggagatcatca

SEQ ID NO: 1313 - DNA, 19 bp, Artificial Sequence
  Description of Artificial Sequence: Synthetic oligonucleotide
gatcctgtcgaaattatta

SEQ ID NO: 1314 - DNA, 19 bp, Homo sapiens
gccttacatcaaattcttt

SEQ ID NO: 1315 - DNA, 19 bp, Artificial Sequence
  Description of Artificial Sequence: Synthetic oligonucleotide
accatatattaagtttttc

SEQ ID NO: 1316 - DNA, 19 bp, Homo sapiens
ggttgcaaagaaattatct

SEQ ID NO: 1317 - DNA, 19 bp, Artificial Sequence
  Description of Artificial Sequence: Synthetic oligonucleotide
cgtagctaaaaagttgtca

SEQ ID NO: 1318 - DNA, 21 bp, Homo sapiens
gaagatgaatgaggttgactt

SEQ ID NO: 1319 - DNA, 21 bp, Artificial Sequence
  Description of Artificial Sequence: Synthetic oligonucleotide
aaaaatgaacgaagtagattt

SEQ ID NO: 1320 - DNA, 21 bp, Homo sapiens
gatgaatgaggttgacttcta

SEQ ID NO: 1321 - DNA, 21 bp, Artificial Sequence
  Description of Artificial Sequence: Synthetic oligonucleotide
aatgaacgaagtagattttta

SEQ ID NO: 1322 - DNA, 19 bp, Homo sapiens
gaatgaggttgacttctat

SEQ ID NO: 1323 - DNA, 19 bp, Artificial Sequence
  Description of Artificial Sequence: Synthetic oligonucleotide
gaacgaagtagatttttac

SEQ ID NO: 1324 - DNA, 29 bp, Homo sapiens
gagcccattgccatccccaacaaacctta

SEQ ID NO: 1325 - DNA, 29 bp, Artificial Sequence
  Description of Artificial Sequence: Synthetic oligonucleotide
gaaccgatagcgattccgaataagccata

SEQ ID NO: 1326 - DNA, 29 bp, Homo sapiens
gcccattgccatccccaacaaaccttaca

SEQ ID NO: 1327 - DNA, 29 bp, Artificial Sequence
  Description of Artificial Sequence: Synthetic oligonucleotide
accgatagcgattccgaataagccatata

SEQ ID NO: 1328 - DNA, 29 bp, Homo sapiens
gcagagaagagtgatccagatggctacga

SEQ ID NO: 1329 - DNA, 29 bp, Artificial Sequence
  Description of Artificial Sequence: Synthetic oligonucleotide
gctgaaaaaagcgaccctgacgggtatga

SEQ ID NO: 1330 - DNA, 25 bp, Homo sapiens
gacaatactgacaaccccgatctga

SEQ ID NO: 1331 - DNA, 25 bp, Artificial Sequence
  Description of Artificial Sequence: Synthetic oligonucleotide
gataacacagataatccggacctca

SEQ ID NO: 1332 - DNA, 29 bp, Homo sapiens
gttgcctactgggagaagactttcaagat

SEQ ID NO: 1333 - DNA, 29 bp, Artificial Sequence
  Description of Artificial Sequence: Synthetic oligonucleotide
gtagcgtattgggaaaaaacatttaaaat

SEQ ID NO: 1334 - DNA, 21 bp, Homo sapiens
gttgcctactgggagaagact

SEQ ID NO: 1335 - DNA, 21 bp, Artificial Sequence
  Description of Artificial Sequence: Synthetic oligonucleotide
gtagcgtattgggaaaaaaca

SEQ ID NO: 1336 - DNA, 19 bp, Homo sapiens
gttgcctactgggagaaga

SEQ ID NO: 1337 - DNA, 19 bp, Artificial Sequence
  Description of Artificial Sequence: Synthetic oligonucleotide
gtagcgtattgggaaaaaa

SEQ ID NO: 1338 - DNA, 25 bp, Homo sapiens
gcctactgggagaagactttcaaga

SEQ ID NO: 1339 - DNA, 25 bp, Artificial Sequence
  Description of Artificial Sequence: Synthetic oligonucleotide
gcgtattgggaaaaaacatttaaaa

SEQ ID NO: 1340 - DNA, 19 bp, Homo sapiens
gcctactgggagaagactt

SEQ ID NO: 1341 - DNA, 19 bp, Artificial Sequence
  Description of Artificial Sequence: Synthetic oligonucleotide
gcgtattgggaaaaaacat

SEQ ID NO: 1342 - DNA, 19 bp, Homo sapiens
gggagaagactttcaagat

SEQ ID NO: 1343 - DNA, 19 bp, Artificial Sequence
  Description of Artificial Sequence: Synthetic oligonucleotide
gggaaaaaacatttaaaat

SEQ ID NO: 1344 - DNA, 19 bp, Homo sapiens
ggagaagactttcaagatt

SEQ ID NO: 1345 - DNA, 19 bp, Artificial Sequence
  Description of Artificial Sequence: Synthetic oligonucleotide
ggaaaaaacatttaaaata

SEQ ID NO: 1346 - DNA, 21 bp, Homo sapiens
ggaaagataaacactgaagat

SEQ ID NO: 1347 - DNA, 21 bp, Artificial Sequence
  Description of Artificial Sequence: Synthetic oligonucleotide
ggtaaaattaatacagaggac

SEQ ID NO: 1348 - DNA, 29 bp, Homo sapiens
ggaaagataaacactgaagatgatgatga

SEQ ID NO: 1349 - DNA, 29 bp, Artificial Sequence
  Description of Artificial Sequence: Synthetic oligonucleotide
ggtaaaattaatacagaggacgacgacga

SEQ ID NO: 1350 - DNA, 25 bp, Homo sapiens
gaaagataaacactgaagatgatga

SEQ ID NO: 1351 - DNA, 25 bp, Artificial Sequence
  Description of Artificial Sequence: Synthetic oligonucleotide
gtaaaattaatacagaggacgacga

SEQ ID NO: 1352 - DNA, 19 bp, Homo sapiens
gaaagataaacactgaaga

SEQ ID NO: 1353 - DNA, 19 bp, Artificial Sequence
  Description of Artificial Sequence: Synthetic oligonucleotide
gtaaaattaatacagagga

SEQ ID NO: 1354 - DNA, 21 bp, Homo sapiens
gaagaggataatgatgacagt

SEQ ID NO: 1355 - DNA, 21 bp, Artificial Sequence
  Description of Artificial Sequence: Synthetic oligonucleotide
gaggaagacaacgacgatagc

SEQ ID NO: 1356 - DNA, 21 bp, Homo sapiens
gaggataatgatgacagtgat

SEQ ID NO: 1357 - DNA, 21 bp, Artificial Sequence
  Description of Artificial Sequence: Synthetic oligonucleotide
gaagacaacgacgatagcgac

SEQ ID NO: 1358 - DNA, 19 bp, Homo sapiens
ggataatgatgacagtgat

SEQ ID NO: 1359 - DNA, 19 bp, Artificial Sequence
  Description of Artificial Sequence: Synthetic oligonucleotide
agacaacgacgatagcgac

SEQ ID NO: 1360 - DNA, 29 bp, Homo sapiens
gagctcaatgatcgcttggcggtctacat

SEQ ID NO: 1361 - DNA, 29 bp, Artificial Sequence
  Description of Artificial Sequence: Synthetic oligonucleotide
gaactgaacgaccggttagccgtgtatat

SEQ ID NO: 1362 - DNA, 29 bp, Homo sapiens
ggagctgagcaaagtgcgtgaggagttta

SEQ ID NO: 1363 - DNA, 29 bp, Artificial Sequence
  Description of Artificial Sequence: Synthetic oligonucleotide
cgaactcagtaaggtccgagaagaattca

SEQ ID NO: 1364 - DNA, 29 bp, Homo sapiens
gagctgagcaaagtgcgtgaggagtttaa

SEQ ID NO: 1365 - DNA, 29 bp, Artificial Sequence
  Description of Artificial Sequence: Synthetic oligonucleotide
gaactcagtaaggtccgagaagaattcaa

SEQ ID NO: 1366 - DNA, 25 bp, Homo sapiens
gctgagcaaagtgcgtgaggagttt

SEQ ID NO: 1367 - DNA, 25 bp, Artificial Sequence
  Description of Artificial Sequence: Synthetic oligonucleotide
actcagtaaggtccgagaagaattc

SEQ ID NO: 1368 - DNA, 21 bp, Homo sapiens
gagcaaagtgcgtgaggagtt

SEQ ID NO: 1369 - DNA, 21 bp, Artificial Sequence
  Description of Artificial Sequence: Synthetic oligonucleotide
cagtaaggtccgagaagaatt

SEQ ID NO: 1370 - DNA, 21 bp, Homo sapiens
gcaaagtgcgtgaggagttta

SEQ ID NO: 1371 - DNA, 21 bp, Artificial Sequence
  Description of Artificial Sequence: Synthetic oligonucleotide
gtaaggtccgagaagaattca

SEQ ID NO: 1372 - DNA, 19 bp, Homo sapiens
gcaaagtgcgtgaggagtt

SEQ ID NO: 1373 - DNA, 19 bp, Artificial Sequence
  Description of Artificial Sequence: Synthetic oligonucleotide
gtaaggtccgagaagaatt

SEQ ID NO: 1374 - DNA, 25 bp, Homo sapiens
gcaataccaagaaggagggtgacct

SEQ ID NO: 1375 - DNA, 25 bp, Artificial Sequence
  Description of Artificial Sequence: Synthetic oligonucleotide
ggaacacgaaaaaagaaggagatct

SEQ ID NO: 1376 - DNA, 29 bp, Homo sapiens
gcatgaggaccaggtggagcagtataaga

SEQ ID NO: 1377 - DNA, 29 bp, Artificial Sequence
  Description of Artificial Sequence: Synthetic oligonucleotide
acacgaagatcaagtcgaacaatacaaaa

SEQ ID NO: 1378 - DNA, 25 bp, Homo sapiens
gaggaccaggtggagcagtataaga

SEQ ID NO: 1379 - DNA, 25 bp, Artificial Sequence
  Description of Artificial Sequence: Synthetic oligonucleotide
gaagatcaagtcgaacaatacaaaa

SEQ ID NO: 1380 - DNA, 21 bp, Homo sapiens
ggaccaggtggagcagtataa

SEQ ID NO: 1381 - DNA, 21 bp, Artificial Sequence
  Description of Artificial Sequence: Synthetic oligonucleotide
agatcaagtcgaacaatacaa

SEQ ID NO: 1382 - DNA, 19 bp, Homo sapiens
gaccaggtggagcagtata

SEQ ID NO: 1383 - DNA, 19 bp, Artificial Sequence
  Description of Artificial Sequence: Synthetic oligonucleotide
gatcaagtcgaacaataca

SEQ ID NO: 1384 - DNA, 21 bp, Homo sapiens
aagctggacaatgccaggcag

SEQ ID NO: 1385 - DNA, 21 bp, Artificial Sequence
  Description of Artificial Sequence: Synthetic oligonucleotide
aaactcgataacgcgagacaa

SEQ ID NO: 1386 - DNA, 29 bp, Homo sapiens
gaccagtccatgggcaattggcagatcaa

SEQ ID NO: 1387 - DNA, 29 bp, Artificial Sequence
  Description of Artificial Sequence: Synthetic oligonucleotide
gatcaatcgatggggaactggcaaattaa

SEQ ID NO: 1388 - DNA, 28 bp, Homo sapiens
ggcagatcaagcgccagaatggagatga

SEQ ID NO: 1389 - DNA, 28 bp, Artificial Sequence
  Description of Artificial Sequence: Synthetic oligonucleotide
ggcaaattaaacggcaaaacggtgacga

SEQ ID NO: 1390 - DNA, 19 bp, Homo sapiens
gcgccagaatggagatgat

SEQ ID NO: 1391 - DNA, 19 bp, Artificial Sequence
  Description of Artificial Sequence: Synthetic oligonucleotide
acggcaaaacggtgacgac

SEQ ID NO: 1392 - DNA, 19 bp, Homo sapiens
gatgatcccttgctgactt

SEQ ID NO: 1393 - DNA, 19 bp, Artificial Sequence
  Description of Artificial Sequence: Synthetic oligonucleotide
gacgacccgttactcacat

SEQ ID NO: 1394 - DNA, 21 bp, Homo sapiens
ggatgaggatggagatgacct

SEQ ID NO: 1395 - DNA, 21 bp, Artificial Sequence
  Description of Artificial Sequence: Synthetic oligonucleotide
agacgaagacggtgacgatct

SEQ ID NO: 1396 - DNA, 29 bp, Homo sapiens
gaagacaggagcaagcagctggaagatga

SEQ ID NO: 1397 - DNA, 29 bp, Artificial Sequence
  Description of Artificial Sequence: Synthetic oligonucleotide
gaggatagaagtaaacaactcgaggacga

SEQ ID NO: 1398 - DNA, 21 bp, Homo sapiens
aagctgagaaggcagcagatg

SEQ ID NO: 1399 - DNA, 21 bp, Artificial Sequence
  Description of Artificial Sequence: Synthetic oligonucleotide
aggcagaaaaagctgctgacg

SEQ ID NO: 1400 - DNA, 25 bp, Homo sapiens
gagaaggcagcagatgagagtgaga

SEQ ID NO: 1401 - DNA, 25 bp, Artificial Sequence
  Description of Artificial Sequence: Synthetic oligonucleotide
gaaaaagctgctgacgaaagcgaaa

SEQ ID NO: 1402 - DNA, 19 bp, Homo sapiens
gagaaggcagcagatgaga

SEQ ID NO: 1403 - DNA, 19 bp, Artificial Sequence
  Description of Artificial Sequence: Synthetic oligonucleotide
gaaaaagctgctgacgaaa

SEQ ID NO: 1404 - DNA, 21 bp, Homo sapiens
gaaggcagcagatgagagtga

SEQ ID NO: 1405 - DNA, 21 bp, Artificial Sequence
  Description of Artificial Sequence: Synthetic oligonucleotide
aaaagctgctgacgaaagcga

SEQ ID NO: 1406 - DNA, 19 bp, Homo sapiens
gcagcagatgagagtgaga

SEQ ID NO: 1407 - DNA, 19 bp, Artificial Sequence
  Description of Artificial Sequence: Synthetic oligonucleotide
gctgctgacgaaagcgaaa

SEQ ID NO: 1408 - DNA, 29 bp, Homo sapiens
gcagatgagagtgagagaggcatgaaagt

SEQ ID NO: 1409 - DNA, 29 bp, Artificial Sequence
  Description of Artificial Sequence: Synthetic oligonucleotide
gctgacgaaagcgaaagggggatgaaggt

SEQ ID NO: 1410 - DNA, 27 bp, Homo sapiens
gcaaatgtgccgagcttgaagaagaat

SEQ ID NO: 1411 - DNA, 27 bp, Artificial Sequence
  Description of Artificial Sequence: Synthetic oligonucleotide
ggaagtgcgcggaactagaggaggagt

SEQ ID NO: 1412 - DNA, 29 bp, Homo sapiens
gaaggaagacagatatgaggaagagatca

SEQ ID NO: 1413 - DNA, 29 bp, Artificial Sequence
  Description of Artificial Sequence: Synthetic oligonucleotide
aaaagaggataggtacgaagaggaaatta

SEQ ID NO: 1414 - DNA, 21 bp, Homo sapiens
aagacgagctgtacgctcaga

SEQ ID NO: 1415 - DNA, 21 bp, Artificial Sequence
  Description of Artificial Sequence: Synthetic oligonucleotide
aggatgaactctatgcacaaa

SEQ ID NO: 1416 - DNA, 21 bp, Homo sapiens
aagagcctcaaccattgaaat

SEQ ID NO: 1417 - DNA, 21 bp, Artificial Sequence
  Description of Artificial Sequence: Synthetic oligonucleotide
gagggcgtctacgatagagat

SEQ ID NO: 1418 - DNA, 21 bp, Homo sapiens
aaccattgaaatgcctcaaca

SEQ ID NO: 1419 - DNA, 21 bp, Artificial Sequence
  Description of Artificial Sequence: Synthetic oligonucleotide
tacgatagagatgccacagca

SEQ ID NO: 1420 - DNA, 21 bp, Homo sapiens
aatgcctcaacaagcacgtca

SEQ ID NO: 1421 - DNA, 21 bp, Artificial Sequence
  Description of Artificial Sequence: Synthetic oligonucleotide
gatgccacagcaggctcgaca

SEQ ID NO: 1422 - DNA, 21 bp, Homo sapiens
tcaatttctgtctcatcttaa

SEQ ID NO: 1423 - DNA, 21 bp, Artificial Sequence
  Description of Artificial Sequence: Synthetic oligonucleotide
ttaacttttgcctgattttga

SEQ ID NO: 1424 - DNA, 21 bp, Homo sapiens
tgtctcttgctgatctgtatc

SEQ ID NO: 1425 - DNA, 21 bp, Artificial Sequence
  Description of Artificial Sequence: Synthetic oligonucleotide
tgcctgttactcatttgcatt

SEQ ID NO: 1426 - DNA, 19 bp, Homo sapiens
gtctcttgctgatctgtat

SEQ ID NO: 1427 - DNA, 19 bp, Artificial Sequence
  Description of Artificial Sequence: Synthetic oligonucleotide
gcctgttactcatttgcat

SEQ ID NO: 1428 - DNA, 29 bp, Homo sapiens
gtgccaagacgggaaatgcatctcctaca

SEQ ID NO: 1429 - DNA, 29 bp, Artificial Sequence
  Description of Artificial Sequence: Synthetic oligonucleotide
atgtcaggatggcaagtgtatttcgtata

SEQ ID NO: 1430 - DNA, 25 bp, Homo sapiens
gccaagacgggaaatgcatctccta

SEQ ID NO: 1431 - DNA, 25 bp, Artificial Sequence
  Description of Artificial Sequence: Synthetic oligonucleotide
gtcaggatggcaagtgtatttcgta

SEQ ID NO: 1432 - DNA, 25 bp, Homo sapiens
gacgggaaatgcatctcctacaagt

SEQ ID NO: 1433 - DNA, 25 bp, Artificial Sequence
  Description of Artificial Sequence: Synthetic oligonucleotide
gatggcaagtgtatttcgtataaat

SEQ ID NO: 1434 - DNA, 19 bp, Homo sapiens
gacgggaaatgcatctcct

SEQ ID NO: 1435 - DNA, 19 bp, Artificial Sequence
  Description of Artificial Sequence: Synthetic oligonucleotide
gatggcaagtgtatttcgt

SEQ ID NO: 1436 - DNA, 19 bp, Homo sapiens
gggaaatgcatctcctaca

SEQ ID NO: 1437 - DNA, 19 bp, Artificial Sequence
  Description of Artificial Sequence: Synthetic oligonucleotide
ggcaagtgtatttcgtata

SEQ ID NO: 1438 - DNA, 21 bp, Homo sapiens
ggaaatgcatctcctacaagt

SEQ ID NO: 1439 - DNA, 21 bp, Artificial Sequence
  Description of Artificial Sequence: Synthetic oligonucleotide
gcaagtgtatttcgtataaat

SEQ ID NO: 1440 - DNA, 19 bp, Homo sapiens
ggaaatgcatctcctacaa

SEQ ID NO: 1441 - DNA, 19 bp, Artificial Sequence
  Description of Artificial Sequence: Synthetic oligonucleotide
gcaagtgtatttcgtataa

SEQ ID NO: 1442 - DNA, 25 bp, Homo sapiens
gtcaaccgctgcattcctcagttct

SEQ ID NO: 1443 - DNA, 25 bp, Artificial Sequence
  Description of Artificial Sequence: Synthetic oligonucleotide
gtgaatcggtgtataccacaatttt

SEQ ID NO: 1444 - DNA, 19 bp, Homo sapiens
gcagttcgtctgtgactca

SEQ ID NO: 1445 - DNA, 19 bp, Artificial Sequence
  Description of Artificial Sequence: Synthetic oligonucleotide
ccaatttgtgtgcgattct

SEQ ID NO: 1446 - DNA, 19 bp, Homo sapiens
gaagatggctcggatgagt

SEQ ID NO: 1447 - DNA, 19 bp, Artificial Sequence
  Description of Artificial Sequence: Synthetic oligonucleotide
gaggacgggtccgacgaat

SEQ ID NO: 1448 - DNA, 21 bp, Homo sapiens
gacgaattccagtgctctgat

SEQ ID NO: 1449 - DNA, 21 bp, Artificial Sequence
  Description of Artificial Sequence: Synthetic oligonucleotide
gatgagtttcaatgttcagac

SEQ ID NO: 1450 - DNA, 19 bp, Homo sapiens
ggacatgagcgatgaagtt

SEQ ID NO: 1451 - DNA, 19 bp, Artificial Sequence
  Description of Artificial Sequence: Synthetic oligonucleotide
agatatgagtgacgaggta

SEQ ID NO: 1452 - DNA, 25 bp, Homo sapiens
gcgaatgcatcaccctggacaaagt

SEQ ID NO: 1453 - DNA, 25 bp, Artificial Sequence
  Description of Artificial Sequence: Synthetic oligonucleotide
gggagtgtattacgctcgataaggt

SEQ ID NO: 1454 - DNA, 19 bp, Homo sapiens
gcatcaccctggacaaagt

SEQ ID NO: 1455 - DNA, 19 bp, Artificial Sequence
  Description of Artificial Sequence: Synthetic oligonucleotide
gtattacgctcgataaggt

SEQ ID NO: 1456 - DNA, 19 bp, Homo sapiens
gctacaagtgccagtgtga

SEQ ID NO: 1457 - DNA, 19 bp, Artificial Sequence
  Description of Artificial Sequence: Synthetic oligonucleotide
ggtataaatgtcaatgcga

SEQ ID NO: 1458 - DNA, 19 bp, Homo sapiens
gacctgtcccagagaatga

SEQ ID NO: 1459 - DNA, 19 bp, Artificial Sequence
  Description of Artificial Sequence: Synthetic oligonucleotide
gatctctcgcaaaggatga

SEQ ID NO: 1460 - DNA, 29 bp, Homo sapiens
gagaatgatctgcagcacccagcttgaca

SEQ ID NO: 1461 - DNA, 29 bp, Artificial Sequence
  Description of Artificial Sequence: Synthetic oligonucleotide
aaggatgatttgtagtacgcaactagata

SEQ ID NO: 1462 - DNA, 21 bp, Homo sapiens
ggatccacagcaacatctact

SEQ ID NO: 1463 - DNA, 21 bp, Artificial Sequence
  Description of Artificial Sequence: Synthetic oligonucleotide
ggattcatagtaatatttatt

SEQ ID NO: 1464 - DNA, 19 bp, Homo sapiens
ggatccacagcaacatcta

SEQ ID NO: 1465 - DNA, 19 bp, Artificial Sequence
  Description of Artificial Sequence: Synthetic oligonucleotide
ggattcatagtaatattta

SEQ ID NO: 1466 - DNA, 25 bp, Homo sapiens
gcaacatctactggaccgactctgt

SEQ ID NO: 1467 - DNA, 25 bp, Artificial Sequence
  Description of Artificial Sequence: Synthetic oligonucleotide
gtaatatttattggacggattcagt

SEQ ID NO: 1468 - DNA, 21 bp, Homo sapiens
gcttcatgtactggactgact

SEQ ID NO: 1469 - DNA, 21 bp, Artificial Sequence
  Description of Artificial Sequence: Synthetic oligonucleotide
ggtttatgtattggacagatt

SEQ ID NO: 1470 - DNA, 19 bp, Homo sapiens
gcttcatgtactggactga

SEQ ID NO: 1471 - DNA, 19 bp, Artificial Sequence
  Description of Artificial Sequence: Synthetic oligonucleotide
ggtttatgtattggacaga

SEQ ID NO: 1472 - DNA, 25 bp, Homo sapiens
ggacatctactcgctggtgactgaa

SEQ ID NO: 1473 - DNA, 25 bp, Artificial Sequence
  Description of Artificial Sequence: Synthetic oligonucleotide
cgatatttattccctcgtcacagag

SEQ ID NO: 1474 - DNA, 19 bp, Homo sapiens
gcatcaccctagatctcct

SEQ ID NO: 1475 - DNA, 19 bp, Artificial Sequence
  Description of Artificial Sequence: Synthetic oligonucleotide
ggattacgcttgacctgct

SEQ ID NO: 1476 - DNA, 29 bp, Homo sapiens
gacgttgctggcagaggaaatgagaagaa

SEQ ID NO: 1477 - DNA, 29 bp, Artificial Sequence
  Description of Artificial Sequence: Synthetic oligonucleotide
gatgtagcagggaggggtaacgaaaaaaa

SEQ ID NO: 1478 - DNA, 25 bp, Homo sapiens
gacgttgctggcagaggaaatgaga

SEQ ID NO: 1479 - DNA, 25 bp, Artificial Sequence
  Description of Artificial Sequence: Synthetic oligonucleotide
gatgtagcagggaggggtaacgaaa

SEQ ID NO: 1480 - DNA, 25 bp, Homo sapiens
gttgctggcagaggaaatgagaaga

SEQ ID NO: 1481 - DNA, 25 bp, Artificial Sequence
  Description of Artificial Sequence: Synthetic oligonucleotide
gtagcagggaggggtaacgaaaaaa

SEQ ID NO: 1482 - DNA, 21 bp, Homo sapiens
gaacatcaacagcatcaactt

SEQ ID NO: 1483 - DNA, 21 bp, Artificial Sequence
  Description of Artificial Sequence: Synthetic oligonucleotide
aaatattaatagtattaattt

SEQ ID NO: 1484 - DNA, 19 bp, Homo sapiens
gaggatgaggtccacattt

SEQ ID NO: 1485 - DNA, 19 bp, Artificial Sequence
  Description of Artificial Sequence: Synthetic oligonucleotide
gaagacgaagtgcatatat

SEQ ID NO: 1486 - DNA, 19 bp, Homo sapiens
gaggtgtatctcctagaca

SEQ ID NO: 1487 - DNA, 19 bp, Artificial Sequence
  Description of Artificial Sequence: Synthetic oligonucleotide
gaagtctacctgcttgata

SEQ ID NO: 1488 - DNA, 19 bp, Homo sapiens
ggtctggaatgcaaagtca

SEQ ID NO: 1489 - DNA, 19 bp, Artificial Sequence
  Description of Artificial Sequence: Synthetic oligonucleotide
ggactcgagtgtaaggtga

SEQ ID NO: 1490 - DNA, 21 bp, Homo sapiens
aatgcaaagtcaaggagcatg

SEQ ID NO: 1491 - DNA, 21 bp, Artificial Sequence
  Description of Artificial Sequence: Synthetic oligonucleotide
agtgtaaggtgaaagaacacg

SEQ ID NO: 1492 - DNA, 21 bp, Homo sapiens
aaagtcaaggagcatggaatc

SEQ ID NO: 1493 - DNA, 21 bp, Artificial Sequence
  Description of Artificial Sequence: Synthetic oligonucleotide
aaggtgaaagaacacggtatt

SEQ ID NO: 1494 - DNA, 25 bp, Homo sapiens
ggagcaggaagaagcagctgttgaa

SEQ ID NO: 1495 - DNA, 25 bp, Artificial Sequence
  Description of Artificial Sequence: Synthetic oligonucleotide
agaacaagaggaggctgcagtagag

SEQ ID NO: 1496 - DNA, 29 bp, Homo sapiens
gagcaggaagaagcagctgttgaagaaga

SEQ ID NO: 1497 - DNA, 29 bp, Artificial Sequence
  Description of Artificial Sequence: Synthetic oligonucleotide
gaacaagaggaggctgcagtagaggagga

SEQ ID NO: 1498 - DNA, 21 bp, Homo sapiens
gcaggaagaagcagctgttga

SEQ ID NO: 1499 - DNA, 21 bp, Artificial Sequence
  Description of Artificial Sequence: Synthetic oligonucleotide
acaagaggaggctgcagtaga

SEQ ID NO: 1500 - DNA, 19 bp, Homo sapiens
ggaagaagcagctgttgaa

SEQ ID NO: 1501 - DNA, 19 bp, Artificial Sequence
  Description of Artificial Sequence: Synthetic oligonucleotide
agaggaggctgcagtagag

SEQ ID NO: 1502 - DNA, 21 bp, Homo sapiens
aagaggaggactggagagagg

SEQ ID NO: 1503 - DNA, 21 bp, Artificial Sequence
  Description of Artificial Sequence: Synthetic oligonucleotide
aggaagaagattggagggaag

SEQ ID NO: 1504 - DNA, 25 bp, Homo sapiens
ggagaccagggcagaagaagatgaa

SEQ ID NO: 1505 - DNA, 25 bp, Artificial Sequence
  Description of Artificial Sequence: Synthetic oligonucleotide
agaaacgagagctgaggaggacgag

SEQ ID NO: 1506 - DNA, 25 bp, Homo sapiens
gaccagggcagaagaagatgaagaa

SEQ ID NO: 1507 - DNA, 25 bp, Artificial Sequence
  Description of Artificial Sequence: Synthetic oligonucleotide
aacgagagctgaggaggacgaggag

SEQ ID NO: 1508 - DNA, 28 bp, Homo sapiens
gaccagggcagaagaagatgaagaagaa

SEQ ID NO: 1509 - DNA, 28 bp, Artificial Sequence
  Description of Artificial Sequence: Synthetic oligonucleotide
aacgagagctgaggaggacgaggaggag

SEQ ID NO: 1510 - DNA, 25 bp, Homo sapiens
gggcagaagaagatgaagaagaaga

SEQ ID NO: 1511 - DNA, 25 bp, Artificial Sequence
  Description of Artificial Sequence: Synthetic oligonucleotide
gagctgaggaggacgaggaggagga

SEQ ID NO: 1512 - DNA, 21 bp, Homo sapiens
ggcagaagaagatgaagaaga

SEQ ID NO: 1513 - DNA, 21 bp, Artificial Sequence
  Description of Artificial Sequence: Synthetic oligonucleotide
agctgaggaggacgaggagga

SEQ ID NO: 1514 - DNA, 19 bp, Homo sapiens
ggcagaagaagatgaagaa

SEQ ID NO: 1515 - DNA, 19 bp, Artificial Sequence
  Description of Artificial Sequence: Synthetic oligonucleotide
agctgaggaggacgaggag

SEQ ID NO: 1516 - DNA, 21 bp, Homo sapiens
gcagaagaagatgaagaagaa

SEQ ID NO: 1517 - DNA, 21 bp, Artificial Sequence
  Description of Artificial Sequence: Synthetic oligonucleotide
gctgaggaggacgaggaggag

SEQ ID NO: 1518 - DNA, 21 bp, Homo sapiens
aagatgaagaagaagaggaag

SEQ ID NO: 1519 - DNA, 21 bp, Artificial Sequence
  Description of Artificial Sequence: Synthetic oligonucleotide
aggacgaggaggaggaagagg

SEQ ID NO: 1520 - DNA, 21 bp, Homo sapiens
gaagaagaagaggaagcaaag

SEQ ID NO: 1521 - DNA, 21 bp, Artificial Sequence
  Description of Artificial Sequence: Synthetic oligonucleotide
gaggaggaggaagaggctaaa

SEQ ID NO: 1522 - DNA, 21 bp, Homo sapiens
aagcaaaggaggctgaagatg

SEQ ID NO: 1523 - DNA, 21 bp, Artificial Sequence
  Description of Artificial Sequence: Synthetic oligonucleotide
aggctaaagaagcagaggacg

SEQ ID NO: 1524 - DNA, 29 bp, Homo sapiens
gaagcgcatggagaaggacctgaatgagt

SEQ ID NO: 1525 - DNA, 29 bp, Artificial Sequence
  Description of Artificial Sequence: Synthetic oligonucleotide
caaacggatggaaaaagatctcaacgaat

SEQ ID NO: 1526 - DNA, 21 bp, Homo sapiens
agctgtggcagagcatctata

SEQ ID NO: 1527 - DNA, 21 bp, Artificial Sequence
  Description of Artificial Sequence: Synthetic oligonucleotide
aactctggcaaagtatttaca

SEQ ID NO: 1528 - DNA, 21 bp, Homo sapiens
aagaacagattgctgaattca

SEQ ID NO: 1529 - DNA, 21 bp, Artificial Sequence
  Description of Artificial Sequence: Synthetic oligonucleotide
aggagcaaatagcagagttta

SEQ ID NO: 1530 - DNA, 25 bp, Homo sapiens
gaaagatacagatagtgaagaagaa

SEQ ID NO: 1531 - DNA, 25 bp, Artificial Sequence
  Description of Artificial Sequence: Synthetic oligonucleotide
gaaggacactgacagcgaggaggag

SEQ ID NO: 1532 - DNA, 21 bp, Homo sapiens
aagatacagatagtgaagaag

SEQ ID NO: 1533 - DNA, 21 bp, Artificial Sequence
  Description of Artificial Sequence: Synthetic oligonucleotide
aggacactgacagcgaggagg

SEQ ID NO: 1534 - DNA, 29 bp, Homo sapiens
gatgaagaagtagatgaaatgatcagaga

SEQ ID NO: 1535 - DNA, 29 bp, Artificial Sequence
  Description of Artificial Sequence: Synthetic oligonucleotide
gacgaggaggttgacgagatgattaggga

SEQ ID NO: 1536 - DNA, 25 bp, Homo sapiens
gatgaagaagtagatgaaatgatca

SEQ ID NO: 1537 - DNA, 25 bp, Artificial Sequence
  Description of Artificial Sequence: Synthetic oligonucleotide
gacgaggaggttgacgagatgatta

SEQ ID NO: 1538 - DNA, 21 bp, Homo sapiens
aagtagatgaaatgatcagag

SEQ ID NO: 1539 - DNA, 21 bp, Artificial Sequence
  Description of Artificial Sequence: Synthetic oligonucleotide
aggttgacgagatgattaggg

SEQ ID NO: 1540 - DNA, 19 bp, Homo sapiens
ggctgaccaactgactgaa

SEQ ID NO: 1541 - DNA, 19 bp, Artificial Sequence
  Description of Artificial Sequence: Synthetic oligonucleotide
ggcagatcagctcacagag

SEQ ID NO: 1542 - DNA, 21 bp, Homo sapiens
aagagcagattgcagaattca

SEQ ID NO: 1543 - DNA, 21 bp, Artificial Sequence
  Description of Artificial Sequence: Synthetic oligonucleotide
aggaacaaatagctgagttta

SEQ ID NO: 1544 - DNA, 21 bp, Homo sapiens
gagcagattgcagaattcaaa

SEQ ID NO: 1545 - DNA, 21 bp, Artificial Sequence
  Description of Artificial Sequence: Synthetic oligonucleotide
gaacaaatagctgagtttaag

SEQ ID NO: 1546 - DNA, 19 bp, Homo sapiens
gagcagattgcagaattca

SEQ ID NO: 1547 - DNA, 19 bp, Artificial Sequence
  Description of Artificial Sequence: Synthetic oligonucleotide
gaacaaatagctgagttta

SEQ ID NO: 1548 - DNA, 21 bp, Homo sapiens
gcagattgcagaattcaaaga

SEQ ID NO: 1549 - DNA, 21 bp, Artificial Sequence
  Description of Artificial Sequence: Synthetic oligonucleotide
acaaatagctgagtttaagga

SEQ ID NO: 1550 - DNA, 19 bp, Homo sapiens
gcagattgcagaattcaaa

SEQ ID NO: 1551 - DNA, 19 bp, Artificial Sequence
  Description of Artificial Sequence: Synthetic oligonucleotide
acaaatagctgagtttaag

SEQ ID NO: 1552 - DNA, 25 bp, Homo sapiens
gacaaagatggtgatggaactataa

SEQ ID NO: 1553 - DNA, 25 bp, Artificial Sequence
  Description of Artificial Sequence: Synthetic oligonucleotide
gataaggacggagacggtacaatta

SEQ ID NO: 1554 - DNA, 21 bp, Homo sapiens
aaagatggtgatggaactata

SEQ ID NO: 1555 - DNA, 21 bp, Artificial Sequence
  Description of Artificial Sequence: Synthetic oligonucleotide
aaggacggagacggtacaatt

SEQ ID NO: 1556 - DNA, 21 bp, Homo sapiens
aagatggtgatggaactataa

SEQ ID NO: 1557 - DNA, 21 bp, Artificial Sequence
  Description of Artificial Sequence: Synthetic oligonucleotide
aggacggagacggtacaatta

SEQ ID NO: 1558 - DNA, 25 bp, Homo sapiens
ggcagaatcccacagaagcagagtt

SEQ ID NO: 1559 - DNA, 25 bp, Artificial Sequence
  Description of Artificial Sequence: Synthetic oligonucleotide
gccaaaacccgactgaggctgaatt

SEQ ID NO: 1560 - DNA, 25 bp, Homo sapiens
gcagaatcccacagaagcagagtta

SEQ ID NO: 1561 - DNA, 25 bp, Artificial Sequence
  Description of Artificial Sequence: Synthetic oligonucleotide
ccaaaacccgactgaggctgaattg

SEQ ID NO: 1562 - DNA, 21 bp, Homo sapiens
gaatcccacagaagcagagtt

SEQ ID NO: 1563 - DNA, 21 bp, Artificial Sequence
  Description of Artificial Sequence: Synthetic oligonucleotide
aaacccgactgaggctgaatt

SEQ ID NO: 1564 - DNA, 21 bp, Homo sapiens
gaagtagatgctgatggtaat

SEQ ID NO: 1565 - DNA, 21 bp, Artificial Sequence
  Description of Artificial Sequence: Synthetic oligonucleotide
gaggttgacgcagacggaaac

SEQ ID NO: 1566 - DNA, 21 bp, Homo sapiens
aagtagatgctgatggtaatg

SEQ ID NO: 1567 - DNA, 21 bp, Artificial Sequence
  Description of Artificial Sequence: Synthetic oligonucleotide
aggttgacgcagacggaaacg

SEQ ID NO: 1568 - DNA, 25 bp, Homo sapiens
gctgatggtaatggcacaattgact

SEQ ID NO: 1569 - DNA, 25 bp, Artificial Sequence
  Description of Artificial Sequence: Synthetic oligonucleotide
gcagacggaaacgggactatagatt

SEQ ID NO: 1570 - DNA, 21 bp, Homo sapiens
gctgatggtaatggcacaatt

SEQ ID NO: 1571 - DNA, 21 bp, Artificial Sequence
  Description of Artificial Sequence: Synthetic oligonucleotide
gcagacggaaacgggactata

SEQ ID NO: 1572 - DNA, 19 bp, Homo sapiens
ggtaatggcacaattgact

SEQ ID NO: 1573 - DNA, 19 bp, Artificial Sequence
  Description of Artificial Sequence: Synthetic oligonucleotide
ggaaacgggactatagatt

SEQ ID NO: 1574 - DNA, 29 bp, Homo sapiens
ggagagaagttaacagatgaagaagttga

SEQ ID NO: 1575 - DNA, 29 bp, Artificial Sequence
  Description of Artificial Sequence: Synthetic oligonucleotide
ggtgaaaaattgactgacgaggaggtaga

SEQ ID NO: 1576 - DNA, 25 bp, Homo sapiens
gagagaagttaacagatgaagaagt

SEQ ID NO: 1577 - DNA, 25 bp, Artificial Sequence
  Description of Artificial Sequence: Synthetic oligonucleotide
gtgaaaaattgactgacgaggaggt

SEQ ID NO: 1578 - DNA, 29 bp, Homo sapiens
gagaagttaacagatgaagaagttgatga

SEQ ID NO: 1579 - DNA, 29 bp, Artificial Sequence
  Description of Artificial Sequence: Synthetic oligonucleotide
gaaaaattgactgacgaggaggtagacga

SEQ ID NO: 1580 - DNA, 29 bp, Homo sapiens
gctgactgaggagcagattgcagagttca

SEQ ID NO: 1581 - DNA, 29 bp, Artificial Sequence
  Description of Artificial Sequence: Synthetic oligonucleotide
actcacagaagaacaaatagctgaattta

SEQ ID NO: 1582 - DNA, 19 bp, Homo sapiens
gagcagattgcagagttca

SEQ ID NO: 1583 - DNA, 19 bp, Artificial Sequence
  Description of Artificial Sequence: Synthetic oligonucleotide
gaacaaatagctgaattta

SEQ ID NO: 1584 - DNA, 25 bp, Homo sapiens
gacaaggatggagatggcactatca

SEQ ID NO: 1585 - DNA, 25 bp, Artificial Sequence
  Description of Artificial Sequence: Synthetic oligonucleotide
gataaagacggtgacgggacaatta

SEQ ID NO: 1586 - DNA, 21 bp, Homo sapiens
aaggatggagatggcactatc

SEQ ID NO: 1587 - DNA, 21 bp, Artificial Sequence
  Description of Artificial Sequence: Synthetic oligonucleotide
aaagacggtgacgggacaatt

SEQ ID NO: 1588 - DNA, 19 bp, Homo sapiens
gatggagatggcactatca

SEQ ID NO: 1589 - DNA, 19 bp, Artificial Sequence
  Description of Artificial Sequence: Synthetic oligonucleotide
gacggtgacgggacaatta

SEQ ID NO: 1590 - DNA, 29 bp, Homo sapiens
ggagatggcactatcaccaccaaggagtt

SEQ ID NO: 1591 - DNA, 29 bp, Artificial Sequence
  Description of Artificial Sequence: Synthetic oligonucleotide
ggtgacgggacaattacgacgaaagaatt

SEQ ID NO: 1592 - DNA, 21 bp, Homo sapiens
aagcagagctgcaggatatga

SEQ ID NO: 1593 - DNA, 21 bp, Artificial Sequence
  Description of Artificial Sequence: Synthetic oligonucleotide
aggctgaactccaagacatga

SEQ ID NO: 1594 - DNA, 21 bp, Homo sapiens
gctgcaggatatgatcaatga

SEQ ID NO: 1595 - DNA, 21 bp, Artificial Sequence
  Description of Artificial Sequence: Synthetic oligonucleotide
actccaagacatgattaacga

SEQ ID NO: 1596 - DNA, 21 bp, Homo sapiens
aaagatgaaggacacagacag

SEQ ID NO: 1597 - DNA, 21 bp, Artificial Sequence
  Description of Artificial Sequence: Synthetic oligonucleotide
gaaaatgaaagatactgatag

SEQ ID NO: 1598 - DNA, 21 bp, Homo sapiens
aagatgaaggacacagacagt

SEQ ID NO: 1599 - DNA, 21 bp, Artificial Sequence
  Description of Artificial Sequence: Synthetic oligonucleotide
aaaatgaaagatactgatagc

SEQ ID NO: 1600 - DNA, 21 bp, Homo sapiens
aaggacacagacagtgaggag

SEQ ID NO: 1601 - DNA, 21 bp, Artificial Sequence
  Description of Artificial Sequence: Synthetic oligonucleotide
aaagatactgatagcgaagaa

SEQ ID NO: 1602 - DNA, 21 bp, Homo sapiens
aagctgaccgatgaggaggtg

SEQ ID NO: 1603 - DNA, 21 bp, Artificial Sequence
  Description of Artificial Sequence: Synthetic oligonucleotide
aaactcacggacgaagaagtc

SEQ ID NO: 1604 - DNA, 29 bp, Homo sapiens
gaccgatgaggaggtggatgagatgatca

SEQ ID NO: 1605 - DNA, 29 bp, Artificial Sequence
  Description of Artificial Sequence: Synthetic oligonucleotide
cacggacgaagaagtcgacgaaatgatta

SEQ ID NO: 1606 - DNA, 25 bp, Homo sapiens
gatgaggaggtggatgagatgatca

SEQ ID NO: 1607 - DNA, 25 bp, Artificial Sequence
  Description of Artificial Sequence: Synthetic oligonucleotide
gacgaagaagtcgacgaaatgatta

SEQ ID NO: 1608 - DNA, 19 bp, Homo sapiens
gaggaggtggatgagatga

SEQ ID NO: 1609 - DNA, 19 bp, Artificial Sequence
  Description of Artificial Sequence: Synthetic oligonucleotide
gaagaagtcgacgaaatga

SEQ ID NO: 1610 - DNA, 19 bp, Homo sapiens
gaggtggatgagatgatca

SEQ ID NO: 1611 - DNA, 19 bp, Artificial Sequence
  Description of Artificial Sequence: Synthetic oligonucleotide
gaagtcgacgaaatgatta

SEQ ID NO: 1612 - DNA, 29 bp, Homo sapiens
gtgctgaagaggacagtcacagaagacat

SEQ ID NO: 1613 - DNA, 29 bp, Artificial Sequence
  Description of Artificial Sequence: Synthetic oligonucleotide
gtcctcaaaagaactgtgactgaggatat

SEQ ID NO: 1614 - DNA, 21 bp, Homo sapiens
gtgctgaagaggacagtcaca

SEQ ID NO: 1615 - DNA, 21 bp, Artificial Sequence
  Description of Artificial Sequence: Synthetic oligonucleotide
gtcctcaaaagaactgtgact

SEQ ID NO: 1616 - DNA, 19 bp, Homo sapiens
gtgctgaagaggacagtca

SEQ ID NO: 1617 - DNA, 19 bp, Artificial Sequence
  Description of Artificial Sequence: Synthetic oligonucleotide
gtcctcaaaagaactgtga

SEQ ID NO: 1618 - DNA, 19 bp, Homo sapiens
gctgaagaggacagtcaca

SEQ ID NO: 1619 - DNA, 19 bp, Artificial Sequence
  Description of Artificial Sequence: Synthetic oligonucleotide
cctcaaaagaactgtgact

SEQ ID NO: 1620 - DNA, 25 bp, Homo sapiens
gaagaggacagtcacagaagacata

SEQ ID NO: 1621 - DNA, 25 bp, Artificial Sequence
  Description of Artificial Sequence: Synthetic oligonucleotide
caaaagaactgtgactgaggatatt

SEQ ID NO: 1622 - DNA, 21 bp, Homo sapiens
gaagaggacagtcacagaaga

SEQ ID NO: 1623 - DNA, 21 bp, Artificial Sequence
  Description of Artificial Sequence: Synthetic oligonucleotide
caaaagaactgtgactgagga

SEQ ID NO: 1624 - DNA, 21 bp, Homo sapiens
gaggacagtcacagaagacat

SEQ ID NO: 1625 - DNA, 21 bp, Artificial Sequence
  Description of Artificial Sequence: Synthetic oligonucleotide
aagaactgtgactgaggatat

SEQ ID NO: 1626 - DNA, 19 bp, Homo sapiens
ggacagtcacagaagacat

SEQ ID NO: 1627 - DNA, 19 bp, Artificial Sequence
  Description of Artificial Sequence: Synthetic oligonucleotide
gaactgtgactgaggatat

SEQ ID NO: 1628 - DNA, 21 bp, Homo sapiens
gacagtcacagaagacatagt

SEQ ID NO: 1629 - DNA, 21 bp, Artificial Sequence
  Description of Artificial Sequence: Synthetic oligonucleotide
aactgtgactgaggatattgt

SEQ ID NO: 1630 - DNA, 19 bp, Homo sapiens
gacagtcacagaagacata

SEQ ID NO: 1631 - DNA, 19 bp, Artificial Sequence
  Description of Artificial Sequence: Synthetic oligonucleotide
aactgtgactgaggatatt

SEQ ID NO: 1632 - DNA, 29 bp, Homo sapiens
gcctggcttctggtcattgccctgataat

SEQ ID NO: 1633 - DNA, 29 bp, Artificial Sequence
  Description of Artificial Sequence: Synthetic oligonucleotide
gcgtggctactcgtgatagcgctcattat

SEQ ID NO: 1634 - DNA, 25 bp, Homo sapiens
ggcttctggtcattgccctgataat

SEQ ID NO: 1635 - DNA, 25 bp, Artificial Sequence
  Description of Artificial Sequence: Synthetic oligonucleotide
ggctactcgtgatagcgctcattat

SEQ ID NO: 1636 - DNA, 21 bp, Homo sapiens
gattggctcagatcctttaaa

SEQ ID NO: 1637 - DNA, 21 bp, Artificial Sequence
  Description of Artificial Sequence: Synthetic oligonucleotide
aatagggtctgacccattgaa

SEQ ID NO: 1638 - DNA, 29 bp, Homo sapiens
gctatggaggaaaccacggactggatcta

SEQ ID NO: 1639 - DNA, 29 bp, Artificial Sequence
  Description of Artificial Sequence: Synthetic oligonucleotide
gcaatggaagagacgaccgattggattta

SEQ ID NO: 1640 - DNA, 25 bp, Homo sapiens
ggaggaaaccacggactggatctat

SEQ ID NO: 1641 - DNA, 25 bp, Artificial Sequence
  Description of Artificial Sequence: Synthetic oligonucleotide
ggaagagacgaccgattggatttac

SEQ ID NO: 1642 - DNA, 21 bp, Homo sapiens
ggaaaccacggactggatcta

SEQ ID NO: 1643 - DNA, 21 bp, Artificial Sequence
  Description of Artificial Sequence: Synthetic oligonucleotide
agagacgaccgattggattta

SEQ ID NO: 1644 - DNA, 21 bp, Homo sapiens
gaaaccacggactggatctat

SEQ ID NO: 1645 - DNA, 21 bp, Artificial Sequence
  Description of Artificial Sequence: Synthetic oligonucleotide
gagacgaccgattggatttac

SEQ ID NO: 1646 - DNA, 21 bp, Homo sapiens
ggcaagaagcacatgcagtga

SEQ ID NO: 1647 - DNA, 21 bp, Artificial Sequence
  Description of Artificial Sequence: Synthetic oligonucleotide
gggaaaaaacatatgcaatga

SEQ ID NO: 1648 - DNA, 29 bp, Homo sapiens
gagaacatggtgaagagcagcggagaact

SEQ ID NO: 1649 - DNA, 29 bp, Artificial Sequence
  Description of Artificial Sequence: Synthetic oligonucleotide
gtgagcacggagaggaacaacgcaggaca

SEQ ID NO: 1650 - DNA, 29 bp, Homo sapiens
gaacatggtgaagagcagcggagaactgt

SEQ ID NO: 1651 - DNA, 29 bp, Artificial Sequence
  Description of Artificial Sequence: Synthetic oligonucleotide
gagcacggagaggaacaacgcaggacagt

SEQ ID NO: 1652 - DNA, 29 bp, Homo sapiens
gagcatttagagcatgaagacaaacagaa

SEQ ID NO: 1653 - DNA, 29 bp, Artificial Sequence
  Description of Artificial Sequence: Synthetic oligonucleotide
gaacacttggaacacgaggataagcaaaa

SEQ ID NO: 1654 - DNA, 29 bp, Homo sapiens
gcatttagagcatgaagacaaacagaaca

SEQ ID NO: 1655 - DNA, 29 bp, Artificial Sequence
  Description of Artificial Sequence: Synthetic oligonucleotide
acacttggaacacgaggataagcaaaata

SEQ ID NO: 1656 - DNA, 29 bp, Homo sapiens
gttgcagtccgttctaaccagcatctcat

SEQ ID NO: 1657 - DNA, 29 bp, Artificial Sequence
  Description of Artificial Sequence: Synthetic oligonucleotide
gtagctgtgcgatcaaatcaacacctgat

SEQ ID NO: 1658 - DNA, 29 bp, Homo sapiens
gtccgttctaaccagcatctcatctgtga

SEQ ID NO: 1659 - DNA, 29 bp, Artificial Sequence
  Description of Artificial Sequence: Synthetic oligonucleotide
gtgcgatcaaatcaacacctgatttgcga

SEQ ID NO: 1660 - DNA, 29 bp, Homo sapiens
gggcgtcagtgaaggttctgctcagtata

SEQ ID NO: 1661 - DNA, 29 bp, Artificial Sequence
  Description of Artificial Sequence: Synthetic oligonucleotide
cggggtgagcgagggatcagcacaataca

SEQ ID NO: 1662 - DNA, 29 bp, Homo sapiens
ggcgtcagtgaaggttctgctcagtataa

SEQ ID NO: 1663 - DNA, 29 bp, Artificial Sequence
  Description of Artificial Sequence: Synthetic oligonucleotide
ggggtgagcgagggatcagcacaatacaa

SEQ ID NO: 1664 - DNA, 29 bp, Homo sapiens
gatggcctcttctttccagtcgttagttt

SEQ ID NO: 1665 - DNA, 29 bp, Artificial Sequence
  Description of Artificial Sequence: Synthetic oligonucleotide
gacgggctgtttttccctgtggtaagctt

SEQ ID NO: 1666 - DNA, 29 bp, Homo sapiens
gcctcttctttccagtcgttagtttctct

SEQ ID NO: 1667 - DNA, 29 bp, Artificial Sequence
  Description of Artificial Sequence: Synthetic oligonucleotide
ggctgtttttccctgtggtaagcttttca

SEQ ID NO: 1668 - DNA, 29 bp, Homo sapiens
gtccggttagagatgacaacaagagacaa

SEQ ID NO: 1669 - DNA, 29 bp, Artificial Sequence
  Description of Artificial Sequence: Synthetic oligonucleotide
gacccgtaagggacgataataaaaggcag

SEQ ID NO: 1670 - DNA, 29 bp, Homo sapiens
gaagaaatcctcgccttgttccctacact

SEQ ID NO: 1671 - DNA, 29 bp, Artificial Sequence
  Description of Artificial Sequence: Synthetic oligonucleotide
ggaggaacccacggctagtaccgtataca

SEQ ID NO: 1672 - DNA, 29 bp, Homo sapiens
gaaatcctcgccttgttccctacactctt

SEQ ID NO: 1673 - DNA, 29 bp, Artificial Sequence
  Description of Artificial Sequence: Synthetic oligonucleotide
ggaacccacggctagtaccgtatacacta

SEQ ID NO: 1674 - DNA, 29 bp, Homo sapiens
gcgggattattcaagagtgagcacaagaa

SEQ ID NO: 1675 - DNA, 29 bp, Artificial Sequence
  Description of Artificial Sequence: Synthetic oligonucleotide
gccggtttgtttaaaagcgaacataaaaa

SEQ ID NO: 1676 - DNA, 29 bp, Homo sapiens
ggatcctctgcagttcatgtctcttcata

SEQ ID NO: 1677 - DNA, 29 bp, Artificial Sequence
  Description of Artificial Sequence: Synthetic oligonucleotide
agacccactccaatttatgtcactacaca

SEQ ID NO: 1678 - DNA, 29 bp, Homo sapiens
gatcctctgcagttcatgtctcttcatat

SEQ ID NO: 1679 - DNA, 29 bp, Artificial Sequence
  Description of Artificial Sequence: Synthetic oligonucleotide
gacccactccaatttatgtcactacacat

SEQ ID NO: 1680 - DNA, 29 bp, Homo sapiens
gccatgtggatgaacctcagctcctctat

SEQ ID NO: 1681 - DNA, 29 bp, Artificial Sequence
  Description of Artificial Sequence: Synthetic oligonucleotide
gtcacgtcgacgagccacaactgctgtac

SEQ ID NO: 1682 - DNA, 29 bp, Homo sapiens
gctcctctatgccattgagaacaagtaca

SEQ ID NO: 1683 - DNA, 29 bp, Artificial Sequence
  Description of Artificial Sequence: Synthetic oligonucleotide
actgctgtacgcgatagaaaataaatata

SEQ ID NO: 1684 - DNA, 29 bp, Homo sapiens
gctggctactatgacctgctgattgacat

SEQ ID NO: 1685 - DNA, 29 bp, Artificial Sequence
  Description of Artificial Sequence: Synthetic oligonucleotide
gcagggtattacgatctcctcatagatat

SEQ ID NO: 1686 - DNA, 29 bp, Homo sapiens
gaggacttgaagcacatcttgcagttgat

SEQ ID NO: 1687 - DNA, 29 bp, Artificial Sequence
  Description of Artificial Sequence: Synthetic oligonucleotide
gaagatttaaaacatattttacaattaat

SEQ ID NO: 1688 - DNA, 29 bp, Homo sapiens
gcaagccttaaacatgtcagctgcactca

SEQ ID NO: 1689 - DNA, 29 bp, Artificial Sequence
  Description of Artificial Sequence: Synthetic oligonucleotide
gcaggcgttgaatatgtctgcagctctga

SEQ ID NO: 1690 - DNA, 29 bp, Homo sapiens
gatgcctcttaaactgctgacaaatcatt

SEQ ID NO: 1691 - DNA, 29 bp, Artificial Sequence
  Description of Artificial Sequence: Synthetic oligonucleotide
aatgccactaaagctcctcactaaccact

SEQ ID NO: 1692 - DNA, 29 bp, Homo sapiens
gccctatgatacactgacagccaaagaga

SEQ ID NO: 1693 - DNA, 29 bp, Artificial Sequence
  Description of Artificial Sequence: Synthetic oligonucleotide
cccgtacgacactctcactgcgaaggaaa

SEQ ID NO: 1694 - DNA, 29 bp, Homo sapiens
gacctggaactggacacgccttctattga

SEQ ID NO: 1695 - DNA, 29 bp, Artificial Sequence
  Description of Artificial Sequence: Synthetic oligonucleotide
gatctcgagctcgataccccatcaataga

SEQ ID NO: 1696 - DNA, 29 bp, Homo sapiens
ggtggcagcagaggcaaaggagaacattt

SEQ ID NO: 1697 - DNA, 29 bp, Artificial Sequence
  Description of Artificial Sequence: Synthetic oligonucleotide
ggagggagtagggggaagggtgagcactt

SEQ ID NO: 1698 - DNA, 29 bp, Homo sapiens
ggaggacatgcttccaacaaagagaaaga

SEQ ID NO: 1699 - DNA, 29 bp, Artificial Sequence
  Description of Artificial Sequence: Synthetic oligonucleotide
ggtggtcacgcatcgaataaggaaaagga

SEQ ID NO: 1700 - DNA, 29 bp, Homo sapiens
gaggacatgcttccaacaaagagaaagaa

SEQ ID NO: 1701 - DNA, 29 bp, Artificial Sequence
  Description of Artificial Sequence: Synthetic oligonucleotide
gtggtcacgcatcgaataaggaaaaggag

SEQ ID NO: 1702 - DNA, 29 bp, Homo sapiens
ggacatgcttccaacaaagagaaagaaat

SEQ ID NO: 1703 - DNA, 29 bp, Artificial Sequence
  Description of Artificial Sequence: Synthetic oligonucleotide
ggtcacgcatcgaataaggaaaaggagat

SEQ ID NO: 1704 - DNA, 29 bp, Homo sapiens
ggagttcttgtcaggcataggatttcact

SEQ ID NO: 1705 - DNA, 29 bp, Artificial Sequence
  Description of Artificial Sequence: Synthetic oligonucleotide
ggtgtactagtgagacacagaatatctct

SEQ ID NO: 1706 - DNA, 29 bp, Homo sapiens
gagttcttgtcaggcataggatttcacta

SEQ ID NO: 1707 - DNA, 29 bp, Artificial Sequence
  Description of Artificial Sequence: Synthetic oligonucleotide
gtgtactagtgagacacagaatatctctt

SEQ ID NO: 1708 - DNA, 29 bp, Homo sapiens
ggccagcatcagttcggagaagacctaat

SEQ ID NO: 1709 - DNA, 29 bp, Artificial Sequence
  Description of Artificial Sequence: Synthetic oligonucleotide
gggcaacaccaatttggtgaggatcttat

SEQ ID NO: 1710 - DNA, 29 bp, Homo sapiens
gccagcatcagttcggagaagacctaata

SEQ ID NO: 1711 - DNA, 29 bp, Artificial Sequence
  Description of Artificial Sequence: Synthetic oligonucleotide
ggcaacaccaatttggtgaggatcttatt

SEQ ID NO: 1712 - DNA, 29 bp, Homo sapiens
gtggagaggcaacgttctgcattaggaga

SEQ ID NO: 1713 - DNA, 29 bp, Artificial Sequence
  Description of Artificial Sequence: Synthetic oligonucleotide
gtcgaaagacagcgatcagctttgggtga

SEQ ID NO: 1714 - DNA, 29 bp, Homo sapiens
gctattagatggcaaatggctctttacaa

SEQ ID NO: 1715 - DNA, 29 bp, Artificial Sequence
  Description of Artificial Sequence: Synthetic oligonucleotide
gcaataaggtggcagatggcactatataa

SEQ ID NO: 1716 - DNA, 29 bp, Homo sapiens
gctgtcaatctctttcttcagggatatga

SEQ ID NO: 1717 - DNA, 29 bp, Artificial Sequence
  Description of Artificial Sequence: Synthetic oligonucleotide
gcagtgaacctgttcctacaaggttacga

SEQ ID NO: 1718 - DNA, 29 bp, Homo sapiens
ggcctatgcagatattatggcaaagagtt

SEQ ID NO: 1719 - DNA, 29 bp, Artificial Sequence
  Description of Artificial Sequence: Synthetic oligonucleotide
ggcgtacgctgacataatggctaaaagct

SEQ ID NO: 1720 - DNA, 29 bp, Homo sapiens
gcagatattatggcaaagagttgtcatga

SEQ ID NO: 1721 - DNA, 29 bp, Artificial Sequence
  Description of Artificial Sequence: Synthetic oligonucleotide
gctgacataatggctaaaagctgccacga

SEQ ID NO: 1722 - DNA, 29 bp, Homo sapiens
ggatggtgacagaggaaggatcaggagaa

SEQ ID NO: 1723 - DNA, 29 bp, Artificial Sequence
  Description of Artificial Sequence: Synthetic oligonucleotide
gcatggtcactgaagagggttctggtgag

SEQ ID NO: 1724 - DNA, 29 bp, Homo sapiens
gatggtgacagaggaaggatcaggagaaa

SEQ ID NO: 1725 - DNA, 29 bp, Artificial Sequence
  Description of Artificial Sequence: Synthetic oligonucleotide
catggtcactgaagagggttctggtgaga

SEQ ID NO: 1726 - DNA, 29 bp, Homo sapiens
gagaatgaaaccctcgactacgaagagtt

SEQ ID NO: 1727 - DNA, 29 bp, Artificial Sequence
  Description of Artificial Sequence: Synthetic oligonucleotide
gaaaacgagacgctggattatgaggaatt

SEQ ID NO: 1728 - DNA, 29 bp, Homo sapiens
ggatctgaagagagaaggaggacagtaca

SEQ ID NO: 1729 - DNA, 29 bp, Artificial Sequence
  Description of Artificial Sequence: Synthetic oligonucleotide
cgacctcaaaagggagggtggtcaatata

SEQ ID NO: 1730 - DNA, 29 bp, Homo sapiens
gaaagccaaggaagacaagggcaaacaaa

SEQ ID NO: 1731 - DNA, 29 bp, Artificial Sequence
  Description of Artificial Sequence: Synthetic oligonucleotide
aaaggcgaaagaggataaagggaagcaga

SEQ ID NO: 1732 - DNA, 29 bp, Homo sapiens
gctacatggagcccacgttgcgtatctta

SEQ ID NO: 1733 - DNA, 29 bp, Artificial Sequence
  Description of Artificial Sequence: Synthetic oligonucleotide
ggtatatggaaccgaccttacgaattttg

SEQ ID NO: 1734 - DNA, 29 bp, Homo sapiens
gatgatattaaaggccagtgggatagact

SEQ ID NO: 1735 - DNA, 29 bp, Artificial Sequence
  Description of Artificial Sequence: Synthetic oligonucleotide
gacgacataaaggggcaatgggacaggct

SEQ ID NO: 1736 - DNA, 29 bp, Homo sapiens
gaagacccagcaggagatgaatatgagat

SEQ ID NO: 1737 - DNA, 29 bp, Artificial Sequence
  Description of Artificial Sequence: Synthetic oligonucleotide
gaggatcctgctggtgacgagtacgaaat

SEQ ID NO: 1738 - DNA, 21 bp, Homo sapiens
gggactgctgattcaagaagt

SEQ ID NO: 1739 - DNA, 21 bp, Artificial Sequence
  Description of Artificial Sequence: Synthetic oligonucleotide
ggcacagcagactctaggagc

SEQ ID NO: 1740 - DNA, 19 bp, Homo sapiens
gggactgctgattcaagaa

SEQ ID NO: 1741 - DNA, 19 bp, Artificial Sequence
  Description of Artificial Sequence: Synthetic oligonucleotide
ggcacagcagactctagga

SEQ ID NO: 1742 - DNA, 19 bp, Homo sapiens
gactgctgattcaagaagt

SEQ ID NO: 1743 - DNA, 19 bp, Artificial Sequence
  Description of Artificial Sequence: Synthetic oligonucleotide
cacagcagactctaggagc

SEQ ID NO: 1744 - DNA, 25 bp, Homo sapiens
gattcaagaagtgccaccaggatca

SEQ ID NO: 1745 - DNA, 25 bp, Artificial Sequence
  Description of Artificial Sequence: Synthetic oligonucleotide
gactctaggagcgcgacgagaatta

SEQ ID NO: 1746 - DNA, 21 bp, Homo sapiens
gaaagatgaacctacttacat

SEQ ID NO: 1747 - DNA, 21 bp, Artificial Sequence
  Description of Artificial Sequence: Synthetic oligonucleotide
aaaggacgagccaacatatat

SEQ ID NO: 1748 - DNA, 25 bp, Homo sapiens
gaacctacttacatcctgaacatca

SEQ ID NO: 1749 - DNA, 25 bp, Artificial Sequence
  Description of Artificial Sequence: Synthetic oligonucleotide
gagccaacatatattctcaatatta

SEQ ID NO: 1750 - DNA, 21 bp, Homo sapiens
ggaaactgctccactcacttt

SEQ ID NO: 1751 - DNA, 21 bp, Artificial Sequence
  Description of Artificial Sequence: Synthetic oligonucleotide
ggtaattgttcgacacatttc

SEQ ID NO: 1752 - DNA, 19 bp, Homo sapiens
ggaaactgctccactcact

SEQ ID NO: 1753 - DNA, 19 bp, Artificial Sequence
  Description of Artificial Sequence: Synthetic oligonucleotide
ggtaattgttcgacacatt

SEQ ID NO: 1754 - DNA, 19 bp, Homo sapiens
gaaactgctccactcactt

SEQ ID NO: 1755 - DNA, 19 bp, Artificial Sequence
  Description of Artificial Sequence: Synthetic oligonucleotide
gtaattgttcgacacattt

SEQ ID NO: 1756 - DNA, 29 bp, Homo sapiens
gaagccatctgcaaggagcaacacctctt

SEQ ID NO: 1757 - DNA, 29 bp, Artificial Sequence
  Description of Artificial Sequence: Synthetic oligonucleotide
gaggcgatttgtaaagaacagcatctgtt

SEQ ID NO: 1758 - DNA, 19 bp, Homo sapiens
gcaaggagcaacacctctt

SEQ ID NO: 1759 - DNA, 19 bp, Artificial Sequence
  Description of Artificial Sequence: Synthetic oligonucleotide
gtaaagaacagcatctgtt

SEQ ID NO: 1760 - DNA, 29 bp, Homo sapiens
gagcaacacctcttcctgcctttctccta

SEQ ID NO: 1761 - DNA, 29 bp, Artificial Sequence
  Description of Artificial Sequence: Synthetic oligonucleotide
gaacagcatctgtttctcccattttcgta

SEQ ID NO: 1762 - DNA, 21 bp, Homo sapiens
gggatggtagcacaagtgaca

SEQ ID NO: 1763 - DNA, 21 bp, Artificial Sequence
  Description of Artificial Sequence: Synthetic oligonucleotide
ggcatggttgctcaggtcact

SEQ ID NO: 1764 - DNA, 19 bp, Homo sapiens
gggatggtagcacaagtga

SEQ ID NO: 1765 - DNA, 19 bp, Artificial Sequence
  Description of Artificial Sequence: Synthetic oligonucleotide
ggcatggttgctcaggtca

SEQ ID NO: 1766 - DNA, 19 bp, Homo sapiens
gatggtagcacaagtgaca

SEQ ID NO: 1767 - DNA, 19 bp, Artificial Sequence
  Description of Artificial Sequence: Synthetic oligonucleotide
catggttgctcaggtcact

SEQ ID NO: 1768 - DNA, 19 bp, Homo sapiens
gagcaccaaatccacatca

SEQ ID NO: 1769 - DNA, 19 bp, Artificial Sequence
  Description of Artificial Sequence: Synthetic oligonucleotide
aagtacgaagtcgacttct

SEQ ID NO: 1770 - DNA, 19 bp, Homo sapiens
gagctaatctcttcaataa

SEQ ID NO: 1771 - DNA, 19 bp, Artificial Sequence
  Description of Artificial Sequence: Synthetic oligonucleotide
gggcaaacctgtttaacaa

SEQ ID NO: 1772 - DNA, 21 bp, Homo sapiens
gcctcagtgatgaagcagtca

SEQ ID NO: 1773 - DNA, 21 bp, Artificial Sequence
  Description of Artificial Sequence: Synthetic oligonucleotide
ggctgagcgacgaggctgtga

SEQ ID NO: 1774 - DNA, 19 bp, Homo sapiens
gaagcagtcacatctctct

SEQ ID NO: 1775 - DNA, 19 bp, Artificial Sequence
  Description of Artificial Sequence: Synthetic oligonucleotide
gaggctgtgacttcactgt

SEQ ID NO: 1776 - DNA, 21 bp, Homo sapiens
gagctgctggacattgctaat

SEQ ID NO: 1777 - DNA, 21 bp, Artificial Sequence
  Description of Artificial Sequence: Synthetic oligonucleotide
gaactcctcgatatagcaaac

SEQ ID NO: 1778 - DNA, 21 bp, Homo sapiens
gctgctggacattgctaatta

SEQ ID NO: 1779 - DNA, 21 bp, Artificial Sequence
  Description of Artificial Sequence: Synthetic oligonucleotide
actcctcgatatagcaaacta

SEQ ID NO: 1780 - DNA, 19 bp, Homo sapiens
gctgctggacattgctaat

SEQ ID NO: 1781 - DNA, 19 bp, Artificial Sequence
  Description of Artificial Sequence: Synthetic oligonucleotide
actcctcgatatagcaaac

SEQ ID NO: 1782 - DNA, 21 bp, Homo sapiens
gctggacattgctaattacct

SEQ ID NO: 1783 - DNA, 21 bp, Artificial Sequence
  Description of Artificial Sequence: Synthetic oligonucleotide
cctcgatatagcaaactatct

SEQ ID NO: 1784 - DNA, 29 bp, Homo sapiens
ggacattgctaattacctgatggaacaga

SEQ ID NO: 1785 - DNA, 29 bp, Artificial Sequence
  Description of Artificial Sequence: Synthetic oligonucleotide
cgatatagcaaactatctcatggagcaaa

SEQ ID NO: 1786 - DNA, 29 bp, Homo sapiens
gctaattacctgatggaacagattcaaga

SEQ ID NO: 1787 - DNA, 29 bp, Artificial Sequence
  Description of Artificial Sequence: Synthetic oligonucleotide
gcaaactatctcatggagcaaatacagga

SEQ ID NO: 1788 - DNA, 21 bp, Homo sapiens
gatggaacagattcaagatga

SEQ ID NO: 1789 - DNA, 21 bp, Artificial Sequence
  Description of Artificial Sequence: Synthetic oligonucleotide
catggagcaaatacaggacga

SEQ ID NO: 1790 - DNA, 19 bp, Homo sapiens
gatggaacagattcaagat

SEQ ID NO: 1791 - DNA, 19 bp, Artificial Sequence
  Description of Artificial Sequence: Synthetic oligonucleotide
catggagcaaatacaggac

SEQ ID NO: 1792 - DNA, 19 bp, Homo sapiens
gaacagattcaagatgact

SEQ ID NO: 1793 - DNA, 19 bp, Artificial Sequence
  Description of Artificial Sequence: Synthetic oligonucleotide
gagcaaatacaggacgatt

SEQ ID NO: 1794 - DNA, 21 bp, Homo sapiens
gggatgaagattacacctatt

SEQ ID NO: 1795 - DNA, 21 bp, Artificial Sequence
  Description of Artificial Sequence: Synthetic oligonucleotide
gcgacgaggactatacgtact

SEQ ID NO: 1796 - DNA, 21 bp, Homo sapiens
ggatgaagattacacctattt

SEQ ID NO: 1797 - DNA, 21 bp, Artificial Sequence
  Description of Artificial Sequence: Synthetic oligonucleotide
cgacgaggactatacgtactt

SEQ ID NO: 1798 - DNA, 19 bp, Homo sapiens
ggatgaagattacacctat

SEQ ID NO: 1799 - DNA, 19 bp, Artificial Sequence
  Description of Artificial Sequence: Synthetic oligonucleotide
cgacgaggactatacgtac

SEQ ID NO: 1800 - DNA, 19 bp, Homo sapiens
gatgaagattacacctatt

SEQ ID NO: 1801 - DNA, 19 bp, Artificial Sequence
  Description of Artificial Sequence: Synthetic oligonucleotide
gacgaggactatacgtact

SEQ ID NO: 1802 - DNA, 21 bp, Homo sapiens
ggccaaaccatggagcagtta

SEQ ID NO: 1803 - DNA, 21 bp, Artificial Sequence
  Description of Artificial Sequence: Synthetic oligonucleotide
gggcagacgatggaacaattg

SEQ ID NO: 1804 - DNA, 21 bp, Homo sapiens
gccaaaccatggagcagttaa

SEQ ID NO: 1805 - DNA, 21 bp, Artificial Sequence
  Description of Artificial Sequence: Synthetic oligonucleotide
ggcagacgatggaacaattga

SEQ ID NO: 1806 - DNA, 25 bp, Homo sapiens
gtccaaagtacaaagccatcactga

SEQ ID NO: 1807 - DNA, 25 bp, Artificial Sequence
  Description of Artificial Sequence: Synthetic oligonucleotide
gtgcagagcactaaaccttctctca

SEQ ID NO: 1808 - DNA, 29 bp, Homo sapiens
gagcctaaagacaaggaccaggaggttct

SEQ ID NO: 1809 - DNA, 29 bp, Artificial Sequence
  Description of Artificial Sequence: Synthetic oligonucleotide
gaaccaaaggataaagatcaagaagtact

SEQ ID NO: 1810 - DNA, 21 bp, Homo sapiens
ggaccaggaggttcttcttca

SEQ ID NO: 1811 - DNA, 21 bp, Artificial Sequence
  Description of Artificial Sequence: Synthetic oligonucleotide
agatcaagaagtactactaca

SEQ ID NO: 1812 - DNA, 25 bp, Homo sapiens
ggaccaggaggttcttcttcagact

SEQ ID NO: 1813 - DNA, 25 bp, Artificial Sequence
  Description of Artificial Sequence: Synthetic oligonucleotide
agatcaagaagtactactacaaaca

SEQ ID NO: 1814 - DNA, 19 bp, Homo sapiens
ggaccaggaggttcttctt

SEQ ID NO: 1815 - DNA, 19 bp, Artificial Sequence
  Description of Artificial Sequence: Synthetic oligonucleotide
agatcaagaagtactacta

SEQ ID NO: 1816 - DNA, 25 bp, Homo sapiens
gaccaggaggttcttcttcagactt

SEQ ID NO: 1817 - DNA, 25 bp, Artificial Sequence
  Description of Artificial Sequence: Synthetic oligonucleotide
gatcaagaagtactactacaaacat

SEQ ID NO: 1818 - DNA, 21 bp, Homo sapiens
ggaggttcttcttcagacttt

SEQ ID NO: 1819 - DNA, 21 bp, Artificial Sequence
  Description of Artificial Sequence: Synthetic oligonucleotide
agaagtactactacaaacatt

SEQ ID NO: 1820 - DNA, 19 bp, Homo sapiens
ggaggttcttcttcagact

SEQ ID NO: 1821 - DNA, 19 bp, Artificial Sequence
  Description of Artificial Sequence: Synthetic oligonucleotide
agaagtactactacaaaca

SEQ ID NO: 1822 - DNA, 19 bp, Homo sapiens
gaggttcttcttcagactt

SEQ ID NO: 1823 - DNA, 19 bp, Artificial Sequence
  Description of Artificial Sequence: Synthetic oligonucleotide
gaagtactactacaaacat

SEQ ID NO: 1824 - DNA, 21 bp, Homo sapiens
ggctgcctatcttatgttgat

SEQ ID NO: 1825 - DNA, 21 bp, Artificial Sequence
  Description of Artificial Sequence: Synthetic oligonucleotide
cgcagcgtacctaatgttaat

SEQ ID NO: 1826 - DNA, 19 bp, Homo sapiens
gctgcctatcttatgttga

SEQ ID NO: 1827 - DNA, 19 bp, Artificial Sequence
  Description of Artificial Sequence: Synthetic oligonucleotide
gcagcgtacctaatgttaa

SEQ ID NO: 1828 - DNA, 19 bp, Homo sapiens
gcctatcttatgttgatga

SEQ ID NO: 1829 - DNA, 19 bp, Artificial Sequence
  Description of Artificial Sequence: Synthetic oligonucleotide
gcgtacctaatgttaatga

SEQ ID NO: 1830 - DNA, 25 bp, Homo sapiens
ggagtccttcacaggcagatattaa

SEQ ID NO: 1831 - DNA, 25 bp, Artificial Sequence
  Description of Artificial Sequence: Synthetic oligonucleotide
gaagcccatctcaagctgacataaa

SEQ ID NO: 1832 - DNA, 29 bp, Homo sapiens
ggagtccttcacaggcagatattaacaaa

SEQ ID NO: 1833 - DNA, 29 bp, Artificial Sequence
  Description of Artificial Sequence: Synthetic oligonucleotide
gaagcccatctcaagctgacataaataag

SEQ ID NO: 1834 - DNA, 21 bp, Homo sapiens
gagtccttcacaggcagatat

SEQ ID NO: 1835 - DNA, 21 bp, Artificial Sequence
  Description of Artificial Sequence: Synthetic oligonucleotide
aagcccatctcaagctgacat

SEQ ID NO: 1836 - DNA, 21 bp, Homo sapiens
gtccttcacaggcagatatta

SEQ ID NO: 1837 - DNA, 21 bp, Artificial Sequence
  Description of Artificial Sequence: Synthetic oligonucleotide
gcccatctcaagctgacataa

SEQ ID NO: 1838 - DNA, 19 bp, Homo sapiens
gtccttcacaggcagatat

SEQ ID NO: 1839 - DNA, 19 bp, Artificial Sequence
  Description of Artificial Sequence: Synthetic oligonucleotide
gcccatctcaagctgacat

SEQ ID NO: 1840 - DNA, 25 bp, Homo sapiens
gtccaaattctaccatgggaacaga

SEQ ID NO: 1841 - DNA, 25 bp, Artificial Sequence
  Description of Artificial Sequence: Synthetic oligonucleotide
gtgcagatacttccttgggagcaaa

SEQ ID NO: 1842 - DNA, 21 bp, Homo sapiens
gggaacagaatgagcaagtga

SEQ ID NO: 1843 - DNA, 21 bp, Artificial Sequence
  Description of Artificial Sequence: Synthetic oligonucleotide
gggagcaaaacgaacaggtca

SEQ ID NO: 1844 - DNA, 25 bp, Homo sapiens
gggaacagaatgagcaagtgaagaa

SEQ ID NO: 1845 - DNA, 25 bp, Artificial Sequence
  Description of Artificial Sequence: Synthetic oligonucleotide
gggagcaaaacgaacaggtcaaaaa

SEQ ID NO: 1846 - DNA, 21 bp, Homo sapiens
ggaacagaatgagcaagtgaa

SEQ ID NO: 1847 - DNA, 21 bp, Artificial Sequence
  Description of Artificial Sequence: Synthetic oligonucleotide
ggagcaaaacgaacaggtcaa

SEQ ID NO: 1848 - DNA, 25 bp, Homo sapiens
gaacagaatgagcaagtgaagaact

SEQ ID NO: 1849 - DNA, 25 bp, Artificial Sequence
  Description of Artificial Sequence: Synthetic oligonucleotide
gagcaaaacgaacaggtcaaaaatt

SEQ ID NO: 1850 - DNA, 19 bp, Homo sapiens
gaacagaatgagcaagtga

SEQ ID NO: 1851 - DNA, 19 bp, Artificial Sequence
  Description of Artificial Sequence: Synthetic oligonucleotide
gagcaaaacgaacaggtca

SEQ ID NO: 1852 - DNA, 21 bp, Homo sapiens
gttgagaagctgattaaagat

SEQ ID NO: 1853 - DNA, 21 bp, Artificial Sequence
  Description of Artificial Sequence: Synthetic oligonucleotide
gtagaaaaactcataaaggac

SEQ ID NO: 1854 - DNA, 19 bp, Homo sapiens
gagaagctgattaaagatt

SEQ ID NO: 1855 - DNA, 19 bp, Artificial Sequence
  Description of Artificial Sequence: Synthetic oligonucleotide
gaaaaactcataaaggact

SEQ ID NO: 1856 - DNA, 25 bp, Homo sapiens
ggagctggattacagttgcaaatat

SEQ ID NO: 1857 - DNA, 25 bp, Artificial Sequence
  Description of Artificial Sequence: Synthetic oligonucleotide
ggtgcaggtttgcaattacagattt

SEQ ID NO: 1858 - DNA, 29 bp, Homo sapiens
gagctggattacagttgcaaatatcttca

SEQ ID NO: 1859 - DNA, 29 bp, Artificial Sequence
  Description of Artificial Sequence: Synthetic oligonucleotide
gtgcaggtttgcaattacagatttcatct

SEQ ID NO: 1860 - DNA, 25 bp, Homo sapiens
gctggattacagttgcaaatatctt

SEQ ID NO: 1861 - DNA, 25 bp, Artificial Sequence
  Description of Artificial Sequence: Synthetic oligonucleotide
gcaggtttgcaattacagatttcat

SEQ ID NO: 1862 - DNA, 21 bp, Homo sapiens
ggattacagttgcaaatatct

SEQ ID NO: 1863 - DNA, 21 bp, Artificial Sequence
  Description of Artificial Sequence: Synthetic oligonucleotide
ggtttgcaattacagatttca

SEQ ID NO: 1864 - DNA, 19 bp, Homo sapiens
ggattacagttgcaaatat

SEQ ID NO: 1865 - DNA, 19 bp, Artificial Sequence
  Description of Artificial Sequence: Synthetic oligonucleotide
ggtttgcaattacagattt

SEQ ID NO: 1866 - DNA, 19 bp, Homo sapiens
gttgcaaatatcttcatct

SEQ ID NO: 1867 - DNA, 19 bp, Artificial Sequence
  Description of Artificial Sequence: Synthetic oligonucleotide
attacagatttcatcttca

SEQ ID NO: 1868 - DNA, 25 bp, Homo sapiens
gcaaatatcttcatctggagtcatt

SEQ ID NO: 1869 - DNA, 25 bp, Artificial Sequence
  Description of Artificial Sequence: Synthetic oligonucleotide
acagatttcatcttcaggtgtgata

SEQ ID NO: 1870 - DNA, 21 bp, Homo sapiens
gacaaatatgggcatcatcat

SEQ ID NO: 1871 - DNA, 21 bp, Artificial Sequence
  Description of Artificial Sequence: Synthetic oligonucleotide
cactaacatggggattattat

SEQ ID NO: 1872 - DNA, 29 bp, Homo sapiens
gcatcatcattccggacttcgctaggagt

SEQ ID NO: 1873 - DNA, 29 bp, Artificial Sequence
  Description of Artificial Sequence: Synthetic oligonucleotide
ggattattatacccgattttgcaagaagc

SEQ ID NO: 1874 - DNA, 21 bp, Homo sapiens
gggaagctgaagtttatcatt

SEQ ID NO: 1875 - DNA, 21 bp, Artificial Sequence
  Description of Artificial Sequence: Synthetic oligonucleotide
ggcaaactcaaattcattata

SEQ ID NO: 1876 - DNA, 19 bp, Homo sapiens
gaagctgaagtttatcatt

SEQ ID NO: 1877 - DNA, 19 bp, Artificial Sequence
  Description of Artificial Sequence: Synthetic oligonucleotide
caaactcaaattcattata

SEQ ID NO: 1878 - DNA, 19 bp, Homo sapiens
gaggcctacaggagagatt

SEQ ID NO: 1879 - DNA, 19 bp, Artificial Sequence
  Description of Artificial Sequence: Synthetic oligonucleotide
cagaccaactggtgaaata

SEQ ID NO: 1880 - DNA, 19 bp, Homo sapiens
ggtggataccctgaagttt

SEQ ID NO: 1881 - DNA, 19 bp, Artificial Sequence
  Description of Artificial Sequence: Synthetic oligonucleotide
agtcgacacgctcaaattc

SEQ ID NO: 1882 - DNA, 21 bp, Homo sapiens
gaagcagactgaggctaccat

SEQ ID NO: 1883 - DNA, 21 bp, Artificial Sequence
  Description of Artificial Sequence: Synthetic oligonucleotide
caaacaaacagaagcaacgat

SEQ ID NO: 1884 - DNA, 29 bp, Homo sapiens
gttgacctcggaacaatcctcagagttaa

SEQ ID NO: 1885 - DNA, 29 bp, Artificial Sequence
  Description of Artificial Sequence: Synthetic oligonucleotide
gtagatctgggtactattctgagggtaaa

SEQ ID NO: 1886 - DNA, 25 bp, Homo sapiens
gacctcggaacaatcctcagagtta

SEQ ID NO: 1887 - DNA, 25 bp, Artificial Sequence
  Description of Artificial Sequence: Synthetic oligonucleotide
gatctgggtactattctgagggtaa

SEQ ID NO: 1888 - DNA, 29 bp, Homo sapiens
gacctcggaacaatcctcagagttaatga

SEQ ID NO: 1889 - DNA, 29 bp, Artificial Sequence
  Description of Artificial Sequence: Synthetic oligonucleotide
gatctgggtactattctgagggtaaacga

SEQ ID NO: 1890 - DNA, 19 bp, Homo sapiens
ggaacaatcctcagagtta

SEQ ID NO: 1891 - DNA, 19 bp, Artificial Sequence
  Description of Artificial Sequence: Synthetic oligonucleotide
ggtactattctgagggtaa

SEQ ID NO: 1892 - DNA, 19 bp, Homo sapiens
gaacaatcctcagagttaa

SEQ ID NO: 1893 - DNA, 19 bp, Artificial Sequence
  Description of Artificial Sequence: Synthetic oligonucleotide
gtactattctgagggtaaa

SEQ ID NO: 1894 - DNA, 19 bp, Homo sapiens
ggacattcagaacaagaaa

SEQ ID NO: 1895 - DNA, 19 bp, Artificial Sequence
  Description of Artificial Sequence: Synthetic oligonucleotide
cgatatacaaaataaaaag

SEQ ID NO: 1896 - DNA, 21 bp, Homo sapiens
gcaagcagaagccagaagtga

SEQ ID NO: 1897 - DNA, 21 bp, Artificial Sequence
  Description of Artificial Sequence: Synthetic oligonucleotide
acaggctgaggcgaggagcga

SEQ ID NO: 1898 - DNA, 19 bp, Homo sapiens
gcaagcagaagccagaagt

SEQ ID NO: 1899 - DNA, 19 bp, Artificial Sequence
  Description of Artificial Sequence: Synthetic oligonucleotide
acaggctgaggcgaggagc

SEQ ID NO: 1900 - DNA, 19 bp, Homo sapiens
gcagaagccagaagtgaga

SEQ ID NO: 1901 - DNA, 19 bp, Artificial Sequence
  Description of Artificial Sequence: Synthetic oligonucleotide
gctgaggcgaggagcgaaa

SEQ ID NO: 1902 - DNA, 21 bp, Homo sapiens
gaacatgggattgccagactt

SEQ ID NO: 1903 - DNA, 21 bp, Artificial Sequence
  Description of Artificial Sequence: Synthetic oligonucleotide
aaatatgggtttacctgattt

SEQ ID NO: 1904 - DNA, 19 bp, Homo sapiens
gacctctccacgaatgtct

SEQ ID NO: 1905 - DNA, 19 bp, Artificial Sequence
  Description of Artificial Sequence: Synthetic oligonucleotide
gatctgtcgaccaacgtgt

SEQ ID NO: 1906 - DNA, 21 bp, Homo sapiens
gtgcaaggatctggagaaaca

SEQ ID NO: 1907 - DNA, 21 bp, Artificial Sequence
  Description of Artificial Sequence: Synthetic oligonucleotide
gtccagggttcaggtgagact

SEQ ID NO: 1908 - DNA, 25 bp, Homo sapiens
gtgcaaggatctggagaaacaacat

SEQ ID NO: 1909 - DNA, 25 bp, Artificial Sequence
  Description of Artificial Sequence: Synthetic oligonucleotide
gtccagggttcaggtgagactactt

SEQ ID NO: 1910 - DNA, 29 bp, Homo sapiens
gtgcaaggatctggagaaacaacatatga

SEQ ID NO: 1911 - DNA, 29 bp, Artificial Sequence
  Description of Artificial Sequence: Synthetic oligonucleotide
gtccagggttcaggtgagactacttacga

SEQ ID NO: 1912 - DNA, 19 bp, Homo sapiens
gtgcaaggatctggagaaa

SEQ ID NO: 1913 - DNA, 19 bp, Artificial Sequence
  Description of Artificial Sequence: Synthetic oligonucleotide
gtccagggttcaggtgaga

SEQ ID NO: 1914 - DNA, 25 bp, Homo sapiens
gcaaggatctggagaaacaacatat

SEQ ID NO: 1915 - DNA, 25 bp, Artificial Sequence
  Description of Artificial Sequence: Synthetic oligonucleotide
ccagggttcaggtgagactacttac

SEQ ID NO: 1916 - DNA, 19 bp, Homo sapiens
gcaaggatctggagaaaca

SEQ ID NO: 1917 - DNA, 19 bp, Artificial Sequence
  Description of Artificial Sequence: Synthetic oligonucleotide
ccagggttcaggtgagact

SEQ ID NO: 1918 - DNA, 21 bp, Homo sapiens
ggatctggagaaacaacatat

SEQ ID NO: 1919 - DNA, 21 bp, Artificial Sequence
  Description of Artificial Sequence: Synthetic oligonucleotide
ggttcaggtgagactacttac

SEQ ID NO: 1920 - DNA, 19 bp, Homo sapiens
ggatctggagaaacaacat

SEQ ID NO: 1921 - DNA, 19 bp, Artificial Sequence
  Description of Artificial Sequence: Synthetic oligonucleotide
ggttcaggtgagactactt

SEQ ID NO: 1922 - DNA, 19 bp, Homo sapiens
gatctggagaaacaacata

SEQ ID NO: 1923 - DNA, 19 bp, Artificial Sequence
  Description of Artificial Sequence: Synthetic oligonucleotide
gttcaggtgagactactta

SEQ ID NO: 1924 - DNA, 25 bp, Homo sapiens
ggagaaacaacatatgaccacaaga

SEQ ID NO: 1925 - DNA, 25 bp, Artificial Sequence
  Description of Artificial Sequence: Synthetic oligonucleotide
ggtgagactacttacgatcataaaa

SEQ ID NO: 1926 - DNA, 25 bp, Homo sapiens
gaaacaacatatgaccacaagaata

SEQ ID NO: 1927 - DNA, 25 bp, Artificial Sequence
  Description of Artificial Sequence: Synthetic oligonucleotide
gagactacttacgatcataaaaaca

SEQ ID NO: 1928 - DNA, 21 bp, Homo sapiens
ggcacatatggcctgtcttgt

SEQ ID NO: 1929 - DNA, 21 bp, Artificial Sequence
  Description of Artificial Sequence: Synthetic oligonucleotide
gggacttacgggctctcatgc

SEQ ID NO: 1930 - DNA, 25 bp, Homo sapiens
ggcacatatggcctgtcttgtcaga

SEQ ID NO: 1931 - DNA, 25 bp, Artificial Sequence
  Description of Artificial Sequence: Synthetic oligonucleotide
gggacttacgggctctcatgccaaa

SEQ ID NO: 1932 - DNA, 19 bp, Homo sapiens
ggcacatatggcctgtctt

SEQ ID NO: 1933 - DNA, 19 bp, Artificial Sequence
  Description of Artificial Sequence: Synthetic oligonucleotide
gggacttacgggctctcat

SEQ ID NO: 1934 - DNA, 25 bp, Homo sapiens
gcctgtcttgtcagagggatcctaa

SEQ ID NO: 1935 - DNA, 25 bp, Artificial Sequence
  Description of Artificial Sequence: Synthetic oligonucleotide
ggctctcatgccaaagagacccaaa

SEQ ID NO: 1936 - DNA, 21 bp, Homo sapiens
gagaactacgagctgacttta

SEQ ID NO: 1937 - DNA, 21 bp, Artificial Sequence
  Description of Artificial Sequence: Synthetic oligonucleotide
gaaaattatgaactcacattg

SEQ ID NO: 1938 - DNA, 19 bp, Homo sapiens
gagaactacgagctgactt

SEQ ID NO: 1939 - DNA, 19 bp, Artificial Sequence
  Description of Artificial Sequence: Synthetic oligonucleotide
gaaaattatgaactcacat

SEQ ID NO: 1940 - DNA, 19 bp, Homo sapiens
gaactacgagctgacttta

SEQ ID NO: 1941 - DNA, 19 bp, Artificial Sequence
  Description of Artificial Sequence: Synthetic oligonucleotide
aaattatgaactcacattg

SEQ ID NO: 1942 - DNA, 19 bp, Homo sapiens
gacaccaatgggaagtata

SEQ ID NO: 1943 - DNA, 19 bp, Artificial Sequence
  Description of Artificial Sequence: Synthetic oligonucleotide
gatacgaacggcaaataca

SEQ ID NO: 1944 - DNA, 21 bp, Homo sapiens
gatggatatgaccttctctaa

SEQ ID NO: 1945 - DNA, 21 bp, Artificial Sequence
  Description of Artificial Sequence: Synthetic oligonucleotide
aatggacatgacgttttcaaa

SEQ ID NO: 1946 - DNA, 19 bp, Homo sapiens
gatggatatgaccttctct

SEQ ID NO: 1947 - DNA, 19 bp, Artificial Sequence
  Description of Artificial Sequence: Synthetic oligonucleotide
aatggacatgacgttttca

SEQ ID NO: 1948 - DNA, 19 bp, Homo sapiens
gctttctggatcactaaat

SEQ ID NO: 1949 - DNA, 19 bp, Artificial Sequence
  Description of Artificial Sequence: Synthetic oligonucleotide
cctatcaggttctcttaac

SEQ ID NO: 1950 - DNA, 29 bp, Homo sapiens
ggatcactaaattcccatggtcttgagtt

SEQ ID NO: 1951 - DNA, 29 bp, Artificial Sequence
  Description of Artificial Sequence: Synthetic oligonucleotide
ggttctcttaactcgcacggactagaatt

SEQ ID NO: 1952 - DNA, 25 bp, Homo sapiens
ggtcttgagttaaatgctgacatct

SEQ ID NO: 1953 - DNA, 25 bp, Artificial Sequence
  Description of Artificial Sequence: Synthetic oligonucleotide
ggactagaattgaacgcagatattt

SEQ ID NO: 1954 - DNA, 21 bp, Homo sapiens
gagttaaatgctgacatctta

SEQ ID NO: 1955 - DNA, 21 bp, Artificial Sequence
  Description of Artificial Sequence: Synthetic oligonucleotide
gaattgaacgcagatattttg

SEQ ID NO: 1956 - DNA, 29 bp, Homo sapiens
gagttaaatgctgacatcttaggcactga

SEQ ID NO: 1957 - DNA, 29 bp, Artificial Sequence
  Description of Artificial Sequence: Synthetic oligonucleotide
gaattgaacgcagatattttggggacaga

SEQ ID NO: 1958 - DNA, 19 bp, Homo sapiens
gttaaatgctgacatctta

SEQ ID NO: 1959 - DNA, 19 bp, Artificial Sequence
  Description of Artificial Sequence: Synthetic oligonucleotide
attgaacgcagatattttg

SEQ ID NO: 1960 - DNA, 21 bp, Homo sapiens
gggcatctatgaaattaacaa

SEQ ID NO: 1961 - DNA, 21 bp, Artificial Sequence
  Description of Artificial Sequence: Synthetic oligonucleotide
gcgcttcaatgaagttgacta

SEQ ID NO: 1962 - DNA, 25 bp, Homo sapiens
gggcatctatgaaattaacaacaaa

SEQ ID NO: 1963 - DNA, 25 bp, Artificial Sequence
  Description of Artificial Sequence: Synthetic oligonucleotide
gcgcttcaatgaagttgactactaa

SEQ ID NO: 1964 - DNA, 19 bp, Homo sapiens
ggcatctatgaaattaaca

SEQ ID NO: 1965 - DNA, 19 bp, Artificial Sequence
  Description of Artificial Sequence: Synthetic oligonucleotide
cgcttcaatgaagttgact

SEQ ID NO: 1966 - DNA, 21 bp, Homo sapiens
gaaggacttaagctctcaaat

SEQ ID NO: 1967 - DNA, 21 bp, Artificial Sequence
  Description of Artificial Sequence: Synthetic oligonucleotide
gagggtctaaaactgtctaac

SEQ ID NO: 1968 - DNA, 25 bp, Homo sapiens
gaaggacttaagctctcaaatgaca

SEQ ID NO: 1969 - DNA, 25 bp, Artificial Sequence
  Description of Artificial Sequence: Synthetic oligonucleotide
gagggtctaaaactgtctaacgata

SEQ ID NO: 1970 - DNA, 29 bp, Homo sapiens
gaaggacttaagctctcaaatgacatgat

SEQ ID NO: 1971 - DNA, 29 bp, Artificial Sequence
  Description of Artificial Sequence: Synthetic oligonucleotide
gagggtctaaaactgtctaacgatatgat

SEQ ID NO: 1972 - DNA, 19 bp, Homo sapiens
gaaggacttaagctctcaa

SEQ ID NO: 1973 - DNA, 19 bp, Artificial Sequence
  Description of Artificial Sequence: Synthetic oligonucleotide
gagggtctaaaactgtcta

SEQ ID NO: 1974 - DNA, 25 bp, Homo sapiens
ggacttaagctctcaaatgacatga

SEQ ID NO: 1975 - DNA, 25 bp, Artificial Sequence
  Description of Artificial Sequence: Synthetic oligonucleotide
ggtctaaaactgtctaacgatatga

SEQ ID NO: 1976 - DNA, 25 bp, Homo sapiens
gcaggcttatcactggacttctctt

SEQ ID NO: 1977 - DNA, 25 bp, Artificial Sequence
  Description of Artificial Sequence: Synthetic oligonucleotide
gctgggttgtctctcgatttttcat

SEQ ID NO: 1978 - DNA, 29 bp, Homo sapiens
gcaggcttatcactggacttctcttcaaa

SEQ ID NO: 1979 - DNA, 29 bp, Artificial Sequence
  Description of Artificial Sequence: Synthetic oligonucleotide
gctgggttgtctctcgatttttcatctaa

SEQ ID NO: 1980 - DNA, 21 bp, Homo sapiens
ggcttatcactggacttctct

SEQ ID NO: 1981 - DNA, 21 bp, Artificial Sequence
  Description of Artificial Sequence: Synthetic oligonucleotide
gggttgtctctcgatttttca

SEQ ID NO: 1982 - DNA, 25 bp, Homo sapiens
ggcttatcactggacttctcttcaa

SEQ ID NO: 1983 - DNA, 25 bp, Artificial Sequence
  Description of Artificial Sequence: Synthetic oligonucleotide
gggttgtctctcgatttttcatcta

SEQ ID NO: 1984 - DNA, 19 bp, Homo sapiens
ggcttatcactggacttct

SEQ ID NO: 1985 - DNA, 19 bp, Artificial Sequence
  Description of Artificial Sequence: Synthetic oligonucleotide
gggttgtctctcgattttt

SEQ ID NO: 1986 - DNA, 21 bp, Homo sapiens
gcttatcactggacttctctt

SEQ ID NO: 1987 - DNA, 21 bp, Artificial Sequence
  Description of Artificial Sequence: Synthetic oligonucleotide
ggttgtctctcgatttttcat

SEQ ID NO: 1988 - DNA, 25 bp, Homo sapiens
gcttatcactggacttctcttcaaa

SEQ ID NO: 1989 - DNA, 25 bp, Artificial Sequence
  Description of Artificial Sequence: Synthetic oligonucleotide
ggttgtctctcgatttttcatctaa

SEQ ID NO: 1990 - DNA, 25 bp, Homo sapiens
gctacagccctattctctggtaact

SEQ ID NO: 1991 - DNA, 25 bp, Artificial Sequence
  Description of Artificial Sequence: Synthetic oligonucleotide
acttcaaccgtactcactcgttaca

SEQ ID NO: 1992 - DNA, 19 bp, Homo sapiens
gccctattctctggtaact

SEQ ID NO: 1993 - DNA, 19 bp, Artificial Sequence
  Description of Artificial Sequence: Synthetic oligonucleotide
accgtactcactcgttaca

SEQ ID NO: 1994 - DNA, 21 bp, Homo sapiens
gctctggatctcaccaacaat

SEQ ID NO: 1995 - DNA, 21 bp, Artificial Sequence
  Description of Artificial Sequence: Synthetic oligonucleotide
gcactcgacctgacgaataac

SEQ ID NO: 1996 - DNA, 25 bp, Homo sapiens
ggatctcaccaacaatgggaaacta

SEQ ID NO: 1997 - DNA, 25 bp, Artificial Sequence
  Description of Artificial Sequence: Synthetic oligonucleotide
cgacctgacgaataacggcaagctt

SEQ ID NO: 1998 - DNA, 19 bp, Homo sapiens
gccttatcagcaagctata

SEQ ID NO: 1999 - DNA, 19 bp, Artificial Sequence
  Description of Artificial Sequence: Synthetic oligonucleotide
gcgttgtctgctagttaca

SEQ ID NO: 2000 - DNA, 21 bp, Homo sapiens
gcaagctataaagcagacact

SEQ ID NO: 2001 - DNA, 21 bp, Artificial Sequence
  Description of Artificial Sequence: Synthetic oligonucleotide
gctagttacaaggctgataca

SEQ ID NO: 2002 - DNA, 19 bp, Homo sapiens
gctataaagcagacactgt

SEQ ID NO: 2003 - DNA, 19 bp, Artificial Sequence
  Description of Artificial Sequence: Synthetic oligonucleotide
gttacaaggctgatacagt

SEQ ID NO: 2004 - DNA, 21 bp, Homo sapiens
gcagacactgttgctaaggtt

SEQ ID NO: 2005 - DNA, 21 bp, Artificial Sequence
  Description of Artificial Sequence: Synthetic oligonucleotide
gctgatacagtagcaaaagta

SEQ ID NO: 2006 - DNA, 19 bp, Homo sapiens
gcttcagccattgacatga

SEQ ID NO: 2007 - DNA, 19 bp, Artificial Sequence
  Description of Artificial Sequence: Synthetic oligonucleotide
gcatctgcgatagatatga

SEQ ID NO: 2008 - DNA, 29 bp, Homo sapiens
gggcagctgtatagcaaattcctgttgaa

SEQ ID NO: 2009 - DNA, 29 bp, Artificial Sequence
  Description of Artificial Sequence: Synthetic oligonucleotide
ggccaactctacagtaagtttctcttaaa

SEQ ID NO: 2010 - DNA, 29 bp, Homo sapiens
ggcagctgtatagcaaattcctgttgaaa

SEQ ID NO: 2011 - DNA, 29 bp, Artificial Sequence
  Description of Artificial Sequence: Synthetic oligonucleotide
gccaactctacagtaagtttctcttaaag

SEQ ID NO: 2012 - DNA, 25 bp, Homo sapiens
gctgtatagcaaattcctgttgaaa

SEQ ID NO: 2013 - DNA, 25 bp, Artificial Sequence
  Description of Artificial Sequence: Synthetic oligonucleotide
actctacagtaagtttctcttaaag

SEQ ID NO: 2014 - DNA, 29 bp, Homo sapiens
gaacctctggcatttactttctctcatga

SEQ ID NO: 2015 - DNA, 29 bp, Artificial Sequence
  Description of Artificial Sequence: Synthetic oligonucleotide
gagccactcgctttcacattttcacacga

SEQ ID NO: 2016 - DNA, 19 bp, Homo sapiens
gaacctctggcatttactt

SEQ ID NO: 2017 - DNA, 19 bp, Artificial Sequence
  Description of Artificial Sequence: Synthetic oligonucleotide
gagccactcgctttcacat

SEQ ID NO: 2018 - DNA, 21 bp, Homo sapiens
ggcatttactttctctcatga

SEQ ID NO: 2019 - DNA, 21 bp, Artificial Sequence
  Description of Artificial Sequence: Synthetic oligonucleotide
cgctttcacattttcacacga

SEQ ID NO: 2020 - DNA, 19 bp, Homo sapiens
ggcatttactttctctcat

SEQ ID NO: 2021 - DNA, 19 bp, Artificial Sequence
  Description of Artificial Sequence: Synthetic oligonucleotide
cgctttcacattttcacac

SEQ ID NO: 2022 - DNA, 21 bp, Homo sapiens
gcatttactttctctcatgat

SEQ ID NO: 2023 - DNA, 21 bp, Artificial Sequence
  Description of Artificial Sequence: Synthetic oligonucleotide
gctttcacattttcacacgac

SEQ ID NO: 2024 - DNA, 25 bp, Homo sapiens
gcatttactttctctcatgattaca

SEQ ID NO: 2025 - DNA, 25 bp, Artificial Sequence
  Description of Artificial Sequence: Synthetic oligonucleotide
gctttcacattttcacacgactata

SEQ ID NO: 2026 - DNA, 19 bp, Homo sapiens
gctccacaagtcatcatct

SEQ ID NO: 2027 - DNA, 19 bp, Artificial Sequence
  Description of Artificial Sequence: Synthetic oligonucleotide
ggtcgactagccaccacct

SEQ ID NO: 2028 - DNA, 29 bp, Homo sapiens
ggcacctggaaactcaagacccaatttaa

SEQ ID NO: 2029 - DNA, 29 bp, Artificial Sequence
  Description of Artificial Sequence: Synthetic oligonucleotide
gggacgtggaagctgaaaacgcagttcaa

SEQ ID NO: 2030 - DNA, 19 bp, Homo sapiens
ggcacctggaaactcaaga

SEQ ID NO: 2031 - DNA, 19 bp, Artificial Sequence
  Description of Artificial Sequence: Synthetic oligonucleotide
gggacgtggaagctgaaaa

SEQ ID NO: 2032 - DNA, 21 bp, Homo sapiens
ggaaactcaagacccaattta

SEQ ID NO: 2033 - DNA, 21 bp, Artificial Sequence
  Description of Artificial Sequence: Synthetic oligonucleotide
ggaagctgaaaacgcagttca

SEQ ID NO: 2034 - DNA, 25 bp, Homo sapiens
ggaaactcaagacccaatttaacaa

SEQ ID NO: 2035 - DNA, 25 bp, Artificial Sequence
  Description of Artificial Sequence: Synthetic oligonucleotide
ggaagctgaaaacgcagttcaataa

SEQ ID NO: 2036 - DNA, 29 bp, Homo sapiens
ggaaactcaagacccaatttaacaacaat

SEQ ID NO: 2037 - DNA, 29 bp, Artificial Sequence
  Description of Artificial Sequence: Synthetic oligonucleotide
ggaagctgaaaacgcagttcaataataac

SEQ ID NO: 2038 - DNA, 21 bp, Homo sapiens
gaaactcaagacccaatttaa

SEQ ID NO: 2039 - DNA, 21 bp, Artificial Sequence
  Description of Artificial Sequence: Synthetic oligonucleotide
gaagctgaaaacgcagttcaa

SEQ ID NO: 2040 - DNA, 21 bp, Homo sapiens
gacccaatttaacaacaatga

SEQ ID NO: 2041 - DNA, 21 bp, Artificial Sequence
  Description of Artificial Sequence: Synthetic oligonucleotide
aacgcagttcaataataacga

SEQ ID NO: 2042 - DNA, 19 bp, Homo sapiens
gacccaatttaacaacaat

SEQ ID NO: 2043 - DNA, 19 bp, Artificial Sequence
  Description of Artificial Sequence: Synthetic oligonucleotide
aacgcagttcaataataac

SEQ ID NO: 2044 - DNA, 29 bp, Homo sapiens
ggacgaactctggctgacctaactctact

SEQ ID NO: 2045 - DNA, 29 bp, Artificial Sequence
  Description of Artificial Sequence: Synthetic oligonucleotide
ggtcgtacactcgcagatcttacacttct

SEQ ID NO: 2046 - DNA, 21 bp, Homo sapiens
gacgaactctggctgacctaa

SEQ ID NO: 2047 - DNA, 21 bp, Artificial Sequence
  Description of Artificial Sequence: Synthetic oligonucleotide
gtcgtacactcgcagatctta

SEQ ID NO: 2048 - DNA, 25 bp, Homo sapiens
gacgaactctggctgacctaactct

SEQ ID NO: 2049 - DNA, 25 bp, Artificial Sequence
  Description of Artificial Sequence: Synthetic oligonucleotide
gtcgtacactcgcagatcttacact

SEQ ID NO: 2050 - DNA, 25 bp, Homo sapiens
gaactctggctgacctaactctact

SEQ ID NO: 2051 - DNA, 25 bp, Artificial Sequence
  Description of Artificial Sequence: Synthetic oligonucleotide
gtacactcgcagatcttacacttct

SEQ ID NO: 2052 - DNA, 21 bp, Homo sapiens
gatgctttagagatgagagat

SEQ ID NO: 2053 - DNA, 21 bp, Artificial Sequence
  Description of Artificial Sequence: Synthetic oligonucleotide
gacgcattggaaatgagggac

SEQ ID NO: 2054 - DNA, 21 bp, Homo sapiens
gaagccccaagaatttacaat

SEQ ID NO: 2055 - DNA, 21 bp, Artificial Sequence
  Description of Artificial Sequence: Synthetic oligonucleotide
aaaaccgcaggagttcactat

SEQ ID NO: 2056 - DNA, 21 bp, Homo sapiens
gaaacctgaagcacatcaata

SEQ ID NO: 2057 - DNA, 21 bp, Artificial Sequence
  Description of Artificial Sequence: Synthetic oligonucleotide
ggaatctcaaacatattaaca

SEQ ID NO: 2058 - DNA, 19 bp, Homo sapiens
gaaactgactgctctcaca

SEQ ID NO: 2059 - DNA, 19 bp, Artificial Sequence
  Description of Artificial Sequence: Synthetic oligonucleotide
aaagctcacagcactgact

SEQ ID NO: 2060 - DNA, 19 bp, Homo sapiens
gggaactacaatttcattt

SEQ ID NO: 2061 - DNA, 19 bp, Artificial Sequence
  Description of Artificial Sequence: Synthetic oligonucleotide
aggtacaactatatctttc

SEQ ID NO: 2062 - DNA, 25 bp, Homo sapiens
gccttcagagccaaagtccatgagt

SEQ ID NO: 2063 - DNA, 25 bp, Artificial Sequence
  Description of Artificial Sequence: Synthetic oligonucleotide
gcgtttagggcgaaggtgcacgaat

SEQ ID NO: 2064 - DNA, 25 bp, Homo sapiens
gccttcagagccaaagtccatgagt

SEQ ID NO: 2065 - DNA, 25 bp, Artificial Sequence
  Description of Artificial Sequence: Synthetic oligonucleotide
gcgtttagggcgaaggtgcacgaat

SEQ ID NO: 2066 - DNA, 29 bp, Homo sapiens
gccttcagagccaaagtccatgagttaat

SEQ ID NO: 2067 - DNA, 29 bp, Artificial Sequence
  Description of Artificial Sequence: Synthetic oligonucleotide
gcgtttagggcgaaggtgcacgaattgat

SEQ ID NO: 2068 - DNA, 21 bp, Homo sapiens
gagccaaagtccatgagttaa

SEQ ID NO: 2069 - DNA, 21 bp, Artificial Sequence
  Description of Artificial Sequence: Synthetic oligonucleotide
gggcgaaggtgcacgaattga

SEQ ID NO: 2070 - DNA, 19 bp, Homo sapiens
gagccaaagtccatgagtt

SEQ ID NO: 2071 - DNA, 19 bp, Artificial Sequence
  Description of Artificial Sequence: Synthetic oligonucleotide
gggcgaaggtgcacgaatt

SEQ ID NO: 2072 - DNA, 29 bp, Homo sapiens
gccaaagtccatgagttaatcgagaggta

SEQ ID NO: 2073 - DNA, 29 bp, Artificial Sequence
  Description of Artificial Sequence: Synthetic oligonucleotide
gcgaaggtgcacgaattgattgaaagata

SEQ ID NO: 2074 - DNA, 19 bp, Homo sapiens
gccaaagtccatgagttaa

SEQ ID NO: 2075 - DNA, 19 bp, Artificial Sequence
  Description of Artificial Sequence: Synthetic oligonucleotide
gcgaaggtgcacgaattga

SEQ ID NO: 2076 - DNA, 29 bp, Homo sapiens
gtccatgagttaatcgagaggtatgaagt

SEQ ID NO: 2077 - DNA, 29 bp, Artificial Sequence
  Description of Artificial Sequence: Synthetic oligonucleotide
gtgcacgaattgattgaaagatacgaggt

SEQ ID NO: 2078 - DNA, 21 bp, Homo sapiens
ggcccaccaatacaagttgaa

SEQ ID NO: 2079 - DNA, 21 bp, Artificial Sequence
  Description of Artificial Sequence: Synthetic oligonucleotide
agcgcatcagtataaattaaa

SEQ ID NO: 2080 - DNA, 29 bp, Homo sapiens
ggcccaccaatacaagttgaaggagacta

SEQ ID NO: 2081 - DNA, 29 bp, Artificial Sequence
  Description of Artificial Sequence: Synthetic oligonucleotide
agcgcatcagtataaattaaaagaaacaa

SEQ ID NO: 2082 - DNA, 29 bp, Homo sapiens
gcccaccaatacaagttgaaggagactat

SEQ ID NO: 2083 - DNA, 29 bp, Artificial Sequence
  Description of Artificial Sequence: Synthetic oligonucleotide
gcgcatcagtataaattaaaagaaacaat

SEQ ID NO: 2084 - DNA, 19 bp, Homo sapiens
gcccaccaatacaagttga

SEQ ID NO: 2085 - DNA, 19 bp, Artificial Sequence
  Description of Artificial Sequence: Synthetic oligonucleotide
gcgcatcagtataaattaa

SEQ ID NO: 2086 - DNA, 21 bp, Homo sapiens
gaagctaagcaatgtcctaca

SEQ ID NO: 2087 - DNA, 21 bp, Artificial Sequence
  Description of Artificial Sequence: Synthetic oligonucleotide
aaaacttagtaacgtgcttca

SEQ ID NO: 2088 - DNA, 19 bp, Homo sapiens
gaagctaagcaatgtccta

SEQ ID NO: 2089 - DNA, 19 bp, Artificial Sequence
  Description of Artificial Sequence: Synthetic oligonucleotide
aaaacttagtaacgtgctt

SEQ ID NO: 2090 - DNA, 19 bp, Homo sapiens
gctaagcaatgtcctacaa

SEQ ID NO: 2091 - DNA, 19 bp, Artificial Sequence
  Description of Artificial Sequence: Synthetic oligonucleotide
acttagtaacgtgcttcag

SEQ ID NO: 2092 - DNA, 21 bp, Homo sapiens
gatttattgatgatgctgtca

SEQ ID NO: 2093 - DNA, 21 bp, Artificial Sequence
  Description of Artificial Sequence: Synthetic oligonucleotide
gtttcatagacgacgcagtga

SEQ ID NO: 2094 - DNA, 21 bp, Homo sapiens
gatgctgtcaagaagcttaat

SEQ ID NO: 2095 - DNA, 21 bp, Artificial Sequence
  Description of Artificial Sequence: Synthetic oligonucleotide
gacgcagtgaaaaaactaaac

SEQ ID NO: 2096 - DNA, 25 bp, Homo sapiens
gatgctgtcaagaagcttaatgaat

SEQ ID NO: 2097 - DNA, 25 bp, Artificial Sequence
  Description of Artificial Sequence: Synthetic oligonucleotide
gacgcagtgaaaaaactaaacgagt

SEQ ID NO: 2098 - DNA, 21 bp, Homo sapiens
gctgtcaagaagcttaatgaa

SEQ ID NO: 2099 - DNA, 21 bp, Artificial Sequence
  Description of Artificial Sequence: Synthetic oligonucleotide
gcagtgaaaaaactaaacgag

SEQ ID NO: 2100 - DNA, 19 bp, Homo sapiens
ggtgactcagagactcaat

SEQ ID NO: 2101 - DNA, 19 bp, Artificial Sequence
  Description of Artificial Sequence: Synthetic oligonucleotide
agtcacacaaaggctgaac

SEQ ID NO: 2102 - DNA, 21 bp, Homo sapiens
gaggaaaccaaggccacagtt

SEQ ID NO: 2103 - DNA, 21 bp, Artificial Sequence
  Description of Artificial Sequence: Synthetic oligonucleotide
gaagagacgaaagcgactgta

SEQ ID NO: 2104 - DNA, 29 bp, Homo sapiens
gaggaaaccaaggccacagttgcagtgta

SEQ ID NO: 2105 - DNA, 29 bp, Artificial Sequence
  Description of Artificial Sequence: Synthetic oligonucleotide
gaagagacgaaagcgactgtagctgtcta

SEQ ID NO: 2106 - DNA, 19 bp, Homo sapiens
ggaaaccaaggccacagtt

SEQ ID NO: 2107 - DNA, 19 bp, Artificial Sequence
  Description of Artificial Sequence: Synthetic oligonucleotide
agagacgaaagcgactgta

SEQ ID NO: 2108 - DNA, 25 bp, Homo sapiens
gaaaccaaggccacagttgcagtgt

SEQ ID NO: 2109 - DNA, 25 bp, Artificial Sequence
  Description of Artificial Sequence: Synthetic oligonucleotide
gagacgaaagcgactgtagctgtct

SEQ ID NO: 2110 - DNA, 29 bp, Homo sapiens
gaaaccaaggccacagttgcagtgtatct

SEQ ID NO: 2111 - DNA, 29 bp, Artificial Sequence
  Description of Artificial Sequence: Synthetic oligonucleotide
gagacgaaagcgactgtagctgtctacct

SEQ ID NO: 2112 - DNA, 21 bp, Homo sapiens
ggccacagttgcagtgtatct

SEQ ID NO: 2113 - DNA, 21 bp, Artificial Sequence
  Description of Artificial Sequence: Synthetic oligonucleotide
agcgactgtagctgtctacct

SEQ ID NO: 2114 - DNA, 19 bp, Homo sapiens
ggccacagttgcagtgtat

SEQ ID NO: 2115 - DNA, 19 bp, Artificial Sequence
  Description of Artificial Sequence: Synthetic oligonucleotide
agcgactgtagctgtctac

SEQ ID NO: 2116 - DNA, 21 bp, Homo sapiens
ggttacaggaggctttaagtt

SEQ ID NO: 2117 - DNA, 21 bp, Artificial Sequence
  Description of Artificial Sequence: Synthetic oligonucleotide
ggttgcaagaagcattgagct

SEQ ID NO: 2118 - DNA, 21 bp, Homo sapiens
ggctttaagttcagcatcttt

SEQ ID NO: 2119 - DNA, 21 bp, Artificial Sequence
  Description of Artificial Sequence: Synthetic oligonucleotide
agcattgagctctgcttcatt

SEQ ID NO: 2120 - DNA, 21 bp, Homo sapiens
ggacattcagcaggaacttca

SEQ ID NO: 2121 - DNA, 21 bp, Artificial Sequence
  Description of Artificial Sequence: Synthetic oligonucleotide
ggatatacaacaagagctaca

SEQ ID NO: 2122 - DNA, 19 bp, Homo sapiens
ggacattcagcaggaactt

SEQ ID NO: 2123 - DNA, 19 bp, Artificial Sequence
  Description of Artificial Sequence: Synthetic oligonucleotide
ggatatacaacaagagcta

SEQ ID NO: 2124 - DNA, 29 bp, Homo sapiens
ggtttatagcacacttgtcacctacattt

SEQ ID NO: 2125 - DNA, 29 bp, Artificial Sequence
  Description of Artificial Sequence: Synthetic oligonucleotide
agtatacagtactctagtgacgtatatat

SEQ ID NO: 2126 - DNA, 25 bp, Homo sapiens
gtttatagcacacttgtcacctaca

SEQ ID NO: 2127 - DNA, 25 bp, Artificial Sequence
  Description of Artificial Sequence: Synthetic oligonucleotide
gtatacagtactctagtgacgtata

SEQ ID NO: 2128 - DNA, 21 bp, Homo sapiens
gcacacttgtcacctacattt

SEQ ID NO: 2129 - DNA, 21 bp, Artificial Sequence
  Description of Artificial Sequence: Synthetic oligonucleotide
gtactctagtgacgtatatat

SEQ ID NO: 2130 - DNA, 25 bp, Homo sapiens
gcacacttgtcacctacatttctga

SEQ ID NO: 2131 - DNA, 25 bp, Artificial Sequence
  Description of Artificial Sequence: Synthetic oligonucleotide
gtactctagtgacgtatatatcaga

SEQ ID NO: 2132 - DNA, 19 bp, Homo sapiens
gcacacttgtcacctacat

SEQ ID NO: 2133 - DNA, 19 bp, Artificial Sequence
  Description of Artificial Sequence: Synthetic oligonucleotide
gtactctagtgacgtatat

SEQ ID NO: 2134 - DNA, 21 bp, Homo sapiens
ggtagagcaagggttcactgt

SEQ ID NO: 2135 - DNA, 21 bp, Artificial Sequence
  Description of Artificial Sequence: Synthetic oligonucleotide
agttgaacagggctttacagt

SEQ ID NO: 2136 - DNA, 19 bp, Homo sapiens
ggtagagcaagggttcact

SEQ ID NO: 2137 - DNA, 19 bp, Artificial Sequence
  Description of Artificial Sequence: Synthetic oligonucleotide
agttgaacagggctttaca

SEQ ID NO: 2138 - DNA, 19 bp, Homo sapiens
gttcctgaaatcaagacca

SEQ ID NO: 2139 - DNA, 19 bp, Artificial Sequence
  Description of Artificial Sequence: Synthetic oligonucleotide
gtaccagagattaaaacga

SEQ ID NO: 2140 - DNA, 21 bp, Homo sapiens
ggctcttcagaaagctacctt

SEQ ID NO: 2141 - DNA, 21 bp, Artificial Sequence
  Description of Artificial Sequence: Synthetic oligonucleotide
agcactacaaaaggcaacgtt

SEQ ID NO: 2142 - DNA, 19 bp, Homo sapiens
gctcttcagaaagctacct

SEQ ID NO: 2143 - DNA, 19 bp, Artificial Sequence
  Description of Artificial Sequence: Synthetic oligonucleotide
gcactacaaaaggcaacgt

SEQ ID NO: 2144 - DNA, 21 bp, Homo sapiens
ggattccatcagttcagataa

SEQ ID NO: 2145 - DNA, 21 bp, Artificial Sequence
  Description of Artificial Sequence: Synthetic oligonucleotide
gaataccttctgtacaaatta

SEQ ID NO: 2146 - DNA, 21 bp, Homo sapiens
gattccatcagttcagataaa

SEQ ID NO: 2147 - DNA, 21 bp, Artificial Sequence
  Description of Artificial Sequence: Synthetic oligonucleotide
aataccttctgtacaaattaa

SEQ ID NO: 2148 - DNA, 19 bp, Homo sapiens
gattccatcagttcagata

SEQ ID NO: 2149 - DNA, 19 bp, Artificial Sequence
  Description of Artificial Sequence: Synthetic oligonucleotide
aataccttctgtacaaatt

SEQ ID NO: 2150 - DNA, 19 bp, Homo sapiens
gaatttaccatccttaaca

SEQ ID NO: 2151 - DNA, 19 bp, Artificial Sequence
  Description of Artificial Sequence: Synthetic oligonucleotide
gagttcacgattctaaata

SEQ ID NO: 2152 - DNA, 19 bp, Homo sapiens
gaaagtaaagatcatcaga

SEQ ID NO: 2153 - DNA, 19 bp, Artificial Sequence
  Description of Artificial Sequence: Synthetic oligonucleotide
gaaggttaaaattattagg

SEQ ID NO: 2154 - DNA, 21 bp, Homo sapiens
ggatctgaaggtggaggacat

SEQ ID NO: 2155 - DNA, 21 bp, Artificial Sequence
  Description of Artificial Sequence: Synthetic oligonucleotide
agacctcaaagtcgaagatat

SEQ ID NO: 2156 - DNA, 21 bp, Homo sapiens
gagaatcaccctgccagactt

SEQ ID NO: 2157 - DNA, 21 bp, Artificial Sequence
  Description of Artificial Sequence: Synthetic oligonucleotide
caggattacgctccctgattt

SEQ ID NO: 2158 - DNA, 19 bp, Homo sapiens
gaatcaccctgccagactt

SEQ ID NO: 2159 - DNA, 19 bp, Artificial Sequence
  Description of Artificial Sequence: Synthetic oligonucleotide
ggattacgctccctgattt

SEQ ID NO: 2160 - DNA, 29 bp, Homo sapiens
gcaaatgcacaactctcaaaccctaagat

SEQ ID NO: 2161 - DNA, 29 bp, Artificial Sequence
  Description of Artificial Sequence: Synthetic oligonucleotide
gctaacgctcagctgtctaatccaaaaat

SEQ ID NO: 2162 - DNA, 25 bp, Homo sapiens
gcacaactctcaaaccctaagatta

SEQ ID NO: 2163 - DNA, 25 bp, Artificial Sequence
  Description of Artificial Sequence: Synthetic oligonucleotide
gctcagctgtctaatccaaaaataa

SEQ ID NO: 2164 - DNA, 21 bp, Homo sapiens
gaacggagcatgggagtgaaa

SEQ ID NO: 2165 - DNA, 21 bp, Artificial Sequence
  Description of Artificial Sequence: Synthetic oligonucleotide
ggaccgaacacggcagcgaga

SEQ ID NO: 2166 - DNA, 19 bp, Homo sapiens
ggagtgattgtcaagataa

SEQ ID NO: 2167 - DNA, 19 bp, Artificial Sequence
  Description of Artificial Sequence: Synthetic oligonucleotide
ggtgtcatagtgaaaatta

SEQ ID NO: 2168 - DNA, 19 bp, Homo sapiens
gagtgattgtcaagataaa

SEQ ID NO: 2169 - DNA, 19 bp, Artificial Sequence
  Description of Artificial Sequence: Synthetic oligonucleotide
gtgtcatagtgaaaattaa

SEQ ID NO: 2170 - DNA, 25 bp, Homo sapiens
gcttaccctggatagcaacactaaa

SEQ ID NO: 2171 - DNA, 25 bp, Artificial Sequence
  Description of Artificial Sequence: Synthetic oligonucleotide
actaacgctcgacagtaatacaaag

SEQ ID NO: 2172 - DNA, 21 bp, Homo sapiens
ggatagcaacactaaatactt

SEQ ID NO: 2173 - DNA, 21 bp, Artificial Sequence
  Description of Artificial Sequence: Synthetic oligonucleotide
cgacagtaatacaaagtattt

SEQ ID NO: 2174 - DNA, 29 bp, Homo sapiens
ggatagcaacactaaatacttccacaaat

SEQ ID NO: 2175 - DNA, 29 bp, Artificial Sequence
  Description of Artificial Sequence: Synthetic oligonucleotide
cgacagtaatacaaagtattttcataagt

SEQ ID NO: 2176 - DNA, 25 bp, Homo sapiens
gcaacactaaatacttccacaaatt

SEQ ID NO: 2177 - DNA, 25 bp, Artificial Sequence
  Description of Artificial Sequence: Synthetic oligonucleotide
gtaatacaaagtattttcataagtt

SEQ ID NO: 2178 - DNA, 25 bp, Homo sapiens
gaacatccccaaactggacttctct

SEQ ID NO: 2179 - DNA, 25 bp, Artificial Sequence
  Description of Artificial Sequence: Synthetic oligonucleotide
aaatattccgaagctcgatttttca

SEQ ID NO: 2180 - DNA, 29 bp, Homo sapiens
gacctgcgcaacgagatcaagacactgtt

SEQ ID NO: 2181 - DNA, 29 bp, Artificial Sequence
  Description of Artificial Sequence: Synthetic oligonucleotide
gatctccggaatgaaattaaaactctctt

SEQ ID NO: 2182 - DNA, 21 bp, Homo sapiens
gcgcaacgagatcaagacact

SEQ ID NO: 2183 - DNA, 21 bp, Artificial Sequence
  Description of Artificial Sequence: Synthetic oligonucleotide
ccggaatgaaattaaaactct

SEQ ID NO: 2184 - DNA, 21 bp, Homo sapiens
gcaacgagatcaagacactgt

SEQ ID NO: 2185 - DNA, 21 bp, Artificial Sequence
  Description of Artificial Sequence: Synthetic oligonucleotide
ggaatgaaattaaaactctct

SEQ ID NO: 2186 - DNA, 19 bp, Homo sapiens
gcaacgagatcaagacact

SEQ ID NO: 2187 - DNA, 19 bp, Artificial Sequence
  Description of Artificial Sequence: Synthetic oligonucleotide
ggaatgaaattaaaactct

SEQ ID NO: 2188 - DNA, 29 bp, Homo sapiens
gttgaaagctggccacatagcatggactt

SEQ ID NO: 2189 - DNA, 29 bp, Artificial Sequence
  Description of Artificial Sequence: Synthetic oligonucleotide
cttaaaggcagggcatattgcttggacat

SEQ ID NO: 2190 - DNA, 29 bp, Homo sapiens
gaaagctggccacatagcatggacttctt

SEQ ID NO: 2191 - DNA, 29 bp, Artificial Sequence
  Description of Artificial Sequence: Synthetic oligonucleotide
aaaggcagggcatattgcttggacatcat

SEQ ID NO: 2192 - DNA, 25 bp, Homo sapiens
gctggccacatagcatggacttctt

SEQ ID NO: 2193 - DNA, 25 bp, Artificial Sequence
  Description of Artificial Sequence: Synthetic oligonucleotide
gcagggcatattgcttggacatcat

SEQ ID NO: 2194 - DNA, 21 bp, Homo sapiens
ggccacatagcatggacttct

SEQ ID NO: 2195 - DNA, 21 bp, Artificial Sequence
  Description of Artificial Sequence: Synthetic oligonucleotide
gggcatattgcttggacatca

SEQ ID NO: 2196 - DNA, 19 bp, Homo sapiens
ggccacatagcatggactt

SEQ ID NO: 2197 - DNA, 19 bp, Artificial Sequence
  Description of Artificial Sequence: Synthetic oligonucleotide
gggcatattgcttggacat

SEQ ID NO: 2198 - DNA, 21 bp, Homo sapiens
gccacatagcatggacttctt

SEQ ID NO: 2199 - DNA, 21 bp, Artificial Sequence
  Description of Artificial Sequence: Synthetic oligonucleotide
ggcatattgcttggacatcat

SEQ ID NO: 2200 - DNA, 19 bp, Homo sapiens
gccccagattctcagatga

SEQ ID NO: 2201 - DNA, 19 bp, Artificial Sequence
  Description of Artificial Sequence: Synthetic oligonucleotide
gtccgaggttttctgacga

SEQ ID NO: 2202 - DNA, 25 bp, Homo sapiens
gatcaatagcaaacacctaagagta

SEQ ID NO: 2203 - DNA, 25 bp, Artificial Sequence
  Description of Artificial Sequence: Synthetic oligonucleotide
aattaacagtaagcatcttagggtt

SEQ ID NO: 2204 - DNA, 21 bp, Homo sapiens
gctaaaggcatggcactgttt

SEQ ID NO: 2205 - DNA, 21 bp, Artificial Sequence
  Description of Artificial Sequence: Synthetic oligonucleotide
gcaaaggggatggctctcttc

SEQ ID NO: 2206 - DNA, 19 bp, Homo sapiens
gctaaaggcatggcactgt

SEQ ID NO: 2207 - DNA, 19 bp, Artificial Sequence
  Description of Artificial Sequence: Synthetic oligonucleotide
gcaaaggggatggctctct

SEQ ID NO: 2208 - DNA, 21 bp, Homo sapiens
ggagaagggaaggcagagttt

SEQ ID NO: 2209 - DNA, 21 bp, Artificial Sequence
  Description of Artificial Sequence: Synthetic oligonucleotide
ggtgagggcaaagctgaattc

SEQ ID NO: 2210 - DNA, 21 bp, Homo sapiens
gagaagggaaggcagagttta

SEQ ID NO: 2211 - DNA, 21 bp, Artificial Sequence
  Description of Artificial Sequence: Synthetic oligonucleotide
gtgagggcaaagctgaattca

SEQ ID NO: 2212 - DNA, 19 bp, Homo sapiens
gagaagggaaggcagagtt

SEQ ID NO: 2213 - DNA, 19 bp, Artificial Sequence
  Description of Artificial Sequence: Synthetic oligonucleotide
gtgagggcaaagctgaatt

SEQ ID NO: 2214 - DNA, 19 bp, Homo sapiens
gaagggaaggcagagttta

SEQ ID NO: 2215 - DNA, 19 bp, Artificial Sequence
  Description of Artificial Sequence: Synthetic oligonucleotide
gagggcaaagctgaattca

SEQ ID NO: 2216 - DNA, 19 bp, Homo sapiens
ggaaaggttattggaactt

SEQ ID NO: 2217 - DNA, 19 bp, Artificial Sequence
  Description of Artificial Sequence: Synthetic oligonucleotide
ggtaaagtaataggtacat

SEQ ID NO: 2218 - DNA, 25 bp, Homo sapiens
gcaagttggcaagtaagtgctaggt

SEQ ID NO: 2219 - DNA, 25 bp, Artificial Sequence
  Description of Artificial Sequence: Synthetic oligonucleotide
gctagctggcaggttagcgcaagat

SEQ ID NO: 2220 - DNA, 29 bp, Homo sapiens
gcaagttggcaagtaagtgctaggttcaa

SEQ ID NO: 2221 - DNA, 29 bp, Artificial Sequence
  Description of Artificial Sequence: Synthetic oligonucleotide
gctagctggcaggttagcgcaagatttaa

SEQ ID NO: 2222 - DNA, 21 bp, Homo sapiens
gttggcaagtaagtgctaggt

SEQ ID NO: 2223 - DNA, 21 bp, Artificial Sequence
  Description of Artificial Sequence: Synthetic oligonucleotide
gctggcaggttagcgcaagat

SEQ ID NO: 2224 - DNA, 25 bp, Homo sapiens
gttggcaagtaagtgctaggttcaa

SEQ ID NO: 2225 - DNA, 25 bp, Artificial Sequence
  Description of Artificial Sequence: Synthetic oligonucleotide
gctggcaggttagcgcaagatttaa

SEQ ID NO: 2226 - DNA, 21 bp, Homo sapiens
ggcaagtaagtgctaggttca

SEQ ID NO: 2227 - DNA, 21 bp, Artificial Sequence
  Description of Artificial Sequence: Synthetic oligonucleotide
ggcaggttagcgcaagattta

SEQ ID NO: 2228 - DNA, 25 bp, Homo sapiens
ggcaagtaagtgctaggttcaatca

SEQ ID NO: 2229 - DNA, 25 bp, Artificial Sequence
  Description of Artificial Sequence: Synthetic oligonucleotide
ggcaggttagcgcaagatttaacca

SEQ ID NO: 2230 - DNA, 29 bp, Homo sapiens
ggcaagtaagtgctaggttcaatcagtat

SEQ ID NO: 2231 - DNA, 29 bp, Artificial Sequence
  Description of Artificial Sequence: Synthetic oligonucleotide
ggcaggttagcgcaagatttaaccaatac

SEQ ID NO: 2232 - DNA, 19 bp, Homo sapiens
ggcaagtaagtgctaggtt

SEQ ID NO: 2233 - DNA, 19 bp, Artificial Sequence
  Description of Artificial Sequence: Synthetic oligonucleotide
ggcaggttagcgcaagatt

SEQ ID NO: 2234 - DNA, 21 bp, Homo sapiens
gcaagtaagtgctaggttcaa

SEQ ID NO: 2235 - DNA, 21 bp, Artificial Sequence
  Description of Artificial Sequence: Synthetic oligonucleotide
gcaggttagcgcaagatttaa

SEQ ID NO: 2236 - DNA, 29 bp, Homo sapiens
gcaagtaagtgctaggttcaatcagtata

SEQ ID NO: 2237 - DNA, 29 bp, Artificial Sequence
  Description of Artificial Sequence: Synthetic oligonucleotide
gcaggttagcgcaagatttaaccaataca

SEQ ID NO: 2238 - DNA, 25 bp, Homo sapiens
gtaagtgctaggttcaatcagtata

SEQ ID NO: 2239 - DNA, 25 bp, Artificial Sequence
  Description of Artificial Sequence: Synthetic oligonucleotide
gttagcgcaagatttaaccaataca

SEQ ID NO: 2240 - DNA, 21 bp, Homo sapiens
gtgctaggttcaatcagtata

SEQ ID NO: 2241 - DNA, 21 bp, Artificial Sequence
  Description of Artificial Sequence: Synthetic oligonucleotide
gcgcaagatttaaccaataca

SEQ ID NO: 2242 - DNA, 19 bp, Homo sapiens
gtgctaggttcaatcagta

SEQ ID NO: 2243 - DNA, 19 bp, Artificial Sequence
  Description of Artificial Sequence: Synthetic oligonucleotide
gcgcaagatttaaccaata

SEQ ID NO: 2244 - DNA, 19 bp, Homo sapiens
gctaggttcaatcagtata

SEQ ID NO: 2245 - DNA, 19 bp, Artificial Sequence
  Description of Artificial Sequence: Synthetic oligonucleotide
gcaagatttaaccaataca

SEQ ID NO: 2246 - DNA, 21 bp, Homo sapiens
ggaggcccatgtaggaataaa

SEQ ID NO: 2247 - DNA, 21 bp, Artificial Sequence
  Description of Artificial Sequence: Synthetic oligonucleotide
ggaagcgcacgttggtattaa

SEQ ID NO: 2248 - DNA, 21 bp, Homo sapiens
gaggcccatgtaggaataaat

SEQ ID NO: 2249 - DNA, 21 bp, Artificial Sequence
  Description of Artificial Sequence: Synthetic oligonucleotide
gaagcgcacgttggtattaac

SEQ ID NO: 2250 - DNA, 19 bp, Homo sapiens
ggcccatgtaggaataaat

SEQ ID NO: 2251 - DNA, 19 bp, Artificial Sequence
  Description of Artificial Sequence: Synthetic oligonucleotide
agcgcacgttggtattaac

SEQ ID NO: 2252 - DNA, 21 bp, Homo sapiens
gctccccaggacctttcaaat

SEQ ID NO: 2253 - DNA, 21 bp, Artificial Sequence
  Description of Artificial Sequence: Synthetic oligonucleotide
actgccgagaacgttccagat

SEQ ID NO: 2254 - DNA, 25 bp, Homo sapiens
gacctttcaaattcctggatacact

SEQ ID NO: 2255 - DNA, 25 bp, Artificial Sequence
  Description of Artificial Sequence: Synthetic oligonucleotide
aacgttccagataccaggttataca

SEQ ID NO: 2256 - DNA, 29 bp, Homo sapiens
gagctgccagtccttcatgtccctagaaa

SEQ ID NO: 2257 - DNA, 29 bp, Artificial Sequence
  Description of Artificial Sequence: Synthetic oligonucleotide
gaactccctgtgctacacgtgccaaggaa

SEQ ID NO: 2258 - DNA, 25 bp, Homo sapiens
gccagtccttcatgtccctagaaat

SEQ ID NO: 2259 - DNA, 25 bp, Artificial Sequence
  Description of Artificial Sequence: Synthetic oligonucleotide
ccctgtgctacacgtgccaaggaac

SEQ ID NO: 2260 - DNA, 21 bp, Homo sapiens
gtccttcatgtccctagaaat

SEQ ID NO: 2261 - DNA, 21 bp, Artificial Sequence
  Description of Artificial Sequence: Synthetic oligonucleotide
gtgctacacgtgccaaggaac

SEQ ID NO: 2262 - DNA, 19 bp, Homo sapiens
gtccttcatgtccctagaa

SEQ ID NO: 2263 - DNA, 19 bp, Artificial Sequence
  Description of Artificial Sequence: Synthetic oligonucleotide
gtgctacacgtgccaagga

SEQ ID NO: 2264 - DNA, 21 bp, Homo sapiens
gctttctcttccagatttcaa

SEQ ID NO: 2265 - DNA, 21 bp, Artificial Sequence
  Description of Artificial Sequence: Synthetic oligonucleotide
actatcactacctgactttaa

SEQ ID NO: 2266 - DNA, 21 bp, Homo sapiens
gccatgggcaatattacctat

SEQ ID NO: 2267 - DNA, 21 bp, Artificial Sequence
  Description of Artificial Sequence: Synthetic oligonucleotide
gcgatggggaacataacgtac

SEQ ID NO: 2268 - DNA, 25 bp, Homo sapiens
gccatgggcaatattacctatgatt

SEQ ID NO: 2269 - DNA, 25 bp, Artificial Sequence
  Description of Artificial Sequence: Synthetic oligonucleotide
gcgatggggaacataacgtacgact

SEQ ID NO: 2270 - DNA, 21 bp, Homo sapiens
gggcaatattacctatgattt

SEQ ID NO: 2271 - DNA, 21 bp, Artificial Sequence
  Description of Artificial Sequence: Synthetic oligonucleotide
ggggaacataacgtacgactt

SEQ ID NO: 2272 - DNA, 19 bp, Homo sapiens
gggcaatattacctatgat

SEQ ID NO: 2273 - DNA, 19 bp, Artificial Sequence
  Description of Artificial Sequence: Synthetic oligonucleotide
ggggaacataacgtacgac

SEQ ID NO: 2274 - DNA, 19 bp, Homo sapiens
ggcaatattacctatgatt

SEQ ID NO: 2275 - DNA, 19 bp, Artificial Sequence
  Description of Artificial Sequence: Synthetic oligonucleotide
gggaacataacgtacgact

SEQ ID NO: 2276 - DNA, 21 bp, Homo sapiens
gttgctcatctcctttcttca

SEQ ID NO: 2277 - DNA, 21 bp, Artificial Sequence
  Description of Artificial Sequence: Synthetic oligonucleotide
gtagcacacctgctatcatct

SEQ ID NO: 2278 - DNA, 19 bp, Homo sapiens
gttgctcatctcctttctt

SEQ ID NO: 2279 - DNA, 19 bp, Artificial Sequence
  Description of Artificial Sequence: Synthetic oligonucleotide
gtagcacacctgctatcat

SEQ ID NO: 2280 - DNA, 21 bp, Homo sapiens
gctcatctcctttcttcatct

SEQ ID NO: 2281 - DNA, 21 bp, Artificial Sequence
  Description of Artificial Sequence: Synthetic oligonucleotide
gcacacctgctatcatcttca

SEQ ID NO: 2282 - DNA, 25 bp, Homo sapiens
gctcatctcctttcttcatcttcat

SEQ ID NO: 2283 - DNA, 25 bp, Artificial Sequence
  Description of Artificial Sequence: Synthetic oligonucleotide
gcacacctgctatcatcttcatctt

SEQ ID NO: 2284 - DNA, 29 bp, Homo sapiens
gctcatctcctttcttcatcttcatctgt

SEQ ID NO: 2285 - DNA, 29 bp, Artificial Sequence
  Description of Artificial Sequence: Synthetic oligonucleotide
gcacacctgctatcatcttcatcttcagt

SEQ ID NO: 2286 - DNA, 19 bp, Homo sapiens
gctcatctcctttcttcat

SEQ ID NO: 2287 - DNA, 19 bp, Artificial Sequence
  Description of Artificial Sequence: Synthetic oligonucleotide
gcacacctgctatcatctt

SEQ ID NO: 2288 - DNA, 25 bp, Homo sapiens
gagggcaccacaagattgacaagaa

SEQ ID NO: 2289 - DNA, 25 bp, Artificial Sequence
  Description of Artificial Sequence: Synthetic oligonucleotide
gaagggacgactaggttaactagga

SEQ ID NO: 2290 - DNA, 19 bp, Homo sapiens
gagggcaccacaagattga

SEQ ID NO: 2291 - DNA, 19 bp, Artificial Sequence
  Description of Artificial Sequence: Synthetic oligonucleotide
gaagggacgactaggttaa

SEQ ID NO: 2292 - DNA, 21 bp, Homo sapiens
ggcaccacaagattgacaaga

SEQ ID NO: 2293 - DNA, 21 bp, Artificial Sequence
  Description of Artificial Sequence: Synthetic oligonucleotide
gggacgactaggttaactagg

SEQ ID NO: 2294 - DNA, 19 bp, Homo sapiens
ggcaccacaagattgacaa

SEQ ID NO: 2295 - DNA, 19 bp, Artificial Sequence
  Description of Artificial Sequence: Synthetic oligonucleotide
gggacgactaggttaacta

SEQ ID NO: 2296 - DNA, 21 bp, Homo sapiens
gcaccacaagattgacaagaa

SEQ ID NO: 2297 - DNA, 21 bp, Artificial Sequence
  Description of Artificial Sequence: Synthetic oligonucleotide
ggacgactaggttaactagga

SEQ ID NO: 2298 - DNA, 21 bp, Homo sapiens
gtggagggtagtcataacagt

SEQ ID NO: 2299 - DNA, 21 bp, Artificial Sequence
  Description of Artificial Sequence: Synthetic oligonucleotide
gtcgaaggaagccacaatagc

SEQ ID NO: 2300 - DNA, 19 bp, Homo sapiens
ggagggtagtcataacagt

SEQ ID NO: 2301 - DNA, 19 bp, Artificial Sequence
  Description of Artificial Sequence: Synthetic oligonucleotide
cgaaggaagccacaatagc

SEQ ID NO: 2302 - DNA, 19 bp, Homo sapiens
gagggtagtcataacagta

SEQ ID NO: 2303 - DNA, 19 bp, Artificial Sequence
  Description of Artificial Sequence: Synthetic oligonucleotide
gaaggaagccacaatagca

SEQ ID NO: 2304 - DNA, 29 bp, Homo sapiens
gtatgatttcaattcttcaatgctgtact

SEQ ID NO: 2305 - DNA, 29 bp, Artificial Sequence
  Description of Artificial Sequence: Synthetic oligonucleotide
atacgactttaactcatctatgctctatt

SEQ ID NO: 2306 - DNA, 25 bp, Homo sapiens
gatttcaattcttcaatgctgtact

SEQ ID NO: 2307 - DNA, 25 bp, Artificial Sequence
  Description of Artificial Sequence: Synthetic oligonucleotide
gactttaactcatctatgctctatt

SEQ ID NO: 2308 - DNA, 21 bp, Homo sapiens
ggaaagcctcacctcttactt

SEQ ID NO: 2309 - DNA, 21 bp, Artificial Sequence
  Description of Artificial Sequence: Synthetic oligonucleotide
agagagtctgacgtcatattt

SEQ ID NO: 2310 - DNA, 19 bp, Homo sapiens
gaaagcctcacctcttact

SEQ ID NO: 2311 - DNA, 19 bp, Artificial Sequence
  Description of Artificial Sequence: Synthetic oligonucleotide
gagagtctgacgtcatatt

SEQ ID NO: 2312 - DNA, 25 bp, Homo sapiens
ggagatgtcaagggttcggttcttt

SEQ ID NO: 2313 - DNA, 25 bp, Artificial Sequence
  Description of Artificial Sequence: Synthetic oligonucleotide
ggtgacgtgaaaggatccgtactat

SEQ ID NO: 2314 - DNA, 21 bp, Homo sapiens
gaggccaacacttacttgaat

SEQ ID NO: 2315 - DNA, 21 bp, Artificial Sequence
  Description of Artificial Sequence: Synthetic oligonucleotide
gaagcgaatacatatttaaac

SEQ ID NO: 2316 - DNA, 19 bp, Homo sapiens
gaggccaacacttacttga

SEQ ID NO: 2317 - DNA, 19 bp, Artificial Sequence
  Description of Artificial Sequence: Synthetic oligonucleotide
gaagcgaatacatatttaa

SEQ ID NO: 2318 - DNA, 19 bp, Homo sapiens
ggccaacacttacttgaat

SEQ ID NO: 2319 - DNA, 19 bp, Artificial Sequence
  Description of Artificial Sequence: Synthetic oligonucleotide
agcgaatacatatttaaac

SEQ ID NO: 2320 - DNA, 19 bp, Homo sapiens
gccaacacttacttgaatt

SEQ ID NO: 2321 - DNA, 19 bp, Artificial Sequence
  Description of Artificial Sequence: Synthetic oligonucleotide
gcgaatacatatttaaact

SEQ ID NO: 2322 - DNA, 29 bp, Homo sapiens
gcaagtcagcccagttccttccatgattt

SEQ ID NO: 2323 - DNA, 29 bp, Artificial Sequence
  Description of Artificial Sequence: Synthetic oligonucleotide
gctagccaaccgagctcgtttcacgactt

SEQ ID NO: 2324 - DNA, 21 bp, Homo sapiens
gcccagttccttccatgattt

SEQ ID NO: 2325 - DNA, 21 bp, Artificial Sequence
  Description of Artificial Sequence: Synthetic oligonucleotide
accgagctcgtttcacgactt

SEQ ID NO: 2326 - DNA, 25 bp, Homo sapiens
gttccttccatgatttccctgacct

SEQ ID NO: 2327 - DNA, 25 bp, Artificial Sequence
  Description of Artificial Sequence: Synthetic oligonucleotide
gctcgtttcacgactttccagatct

SEQ ID NO: 2328 - DNA, 21 bp, Homo sapiens
gtggccctgaatgctaacact

SEQ ID NO: 2329 - DNA, 21 bp, Artificial Sequence
  Description of Artificial Sequence: Synthetic oligonucleotide
gtcgcgctcaacgcaaataca

SEQ ID NO: 2330 - DNA, 19 bp, Homo sapiens
gtggccctgaatgctaaca

SEQ ID NO: 2331 - DNA, 19 bp, Artificial Sequence
  Description of Artificial Sequence: Synthetic oligonucleotide
gtcgcgctcaacgcaaata

SEQ ID NO: 2332 - DNA, 21 bp, Homo sapiens
ggccctgaatgctaacactaa

SEQ ID NO: 2333 - DNA, 21 bp, Artificial Sequence
  Description of Artificial Sequence: Synthetic oligonucleotide
cgcgctcaacgcaaatacaaa

SEQ ID NO: 2334 - DNA, 19 bp, Homo sapiens
ggccctgaatgctaacact

SEQ ID NO: 2335 - DNA, 19 bp, Artificial Sequence
  Description of Artificial Sequence: Synthetic oligonucleotide
cgcgctcaacgcaaataca

SEQ ID NO: 2336 - DNA, 19 bp, Homo sapiens
gccctgaatgctaacacta

SEQ ID NO: 2337 - DNA, 19 bp, Artificial Sequence
  Description of Artificial Sequence: Synthetic oligonucleotide
gcgctcaacgcaaatacaa

SEQ ID NO: 2338 - DNA, 21 bp, Homo sapiens
ggttccatcgtgcaaacttga

SEQ ID NO: 2339 - DNA, 21 bp, Artificial Sequence
  Description of Artificial Sequence: Synthetic oligonucleotide
agtaccttcctgtaagctaga

SEQ ID NO: 2340 - DNA, 19 bp, Homo sapiens
ggttccatcgtgcaaactt

SEQ ID NO: 2341 - DNA, 19 bp, Artificial Sequence
  Description of Artificial Sequence: Synthetic oligonucleotide
agtaccttcctgtaagcta

SEQ ID NO: 2342 - DNA, 25 bp, Homo sapiens
gttccatcgtgcaaacttgacttca

SEQ ID NO: 2343 - DNA, 25 bp, Artificial Sequence
  Description of Artificial Sequence: Synthetic oligonucleotide
gtaccttcctgtaagctagatttta

SEQ ID NO: 2344 - DNA, 29 bp, Homo sapiens
gttccatcgtgcaaacttgacttcagaga

SEQ ID NO: 2345 - DNA, 29 bp, Artificial Sequence
  Description of Artificial Sequence: Synthetic oligonucleotide
gtaccttcctgtaagctagattttaggga

SEQ ID NO: 2346 - DNA, 21 bp, Homo sapiens
gtgcaaacttgacttcagaga

SEQ ID NO: 2347 - DNA, 21 bp, Artificial Sequence
  Description of Artificial Sequence: Synthetic oligonucleotide
ctgtaagctagattttaggga

SEQ ID NO: 2348 - DNA, 19 bp, Homo sapiens
gtgcaaacttgacttcaga

SEQ ID NO: 2349 - DNA, 19 bp, Artificial Sequence
  Description of Artificial Sequence: Synthetic oligonucleotide
ctgtaagctagattttagg

SEQ ID NO: 2350 - DNA, 21 bp, Homo sapiens
gcaaacttgacttcagagaaa

SEQ ID NO: 2351 - DNA, 21 bp, Artificial Sequence
  Description of Artificial Sequence: Synthetic oligonucleotide
gtaagctagattttagggaga

SEQ ID NO: 2352 - DNA, 19 bp, Homo sapiens
gcaaacttgacttcagaga

SEQ ID NO: 2353 - DNA, 19 bp, Artificial Sequence
  Description of Artificial Sequence: Synthetic oligonucleotide
gtaagctagattttaggga

SEQ ID NO: 2354 - DNA, 19 bp, Homo sapiens
gctgagaacttcatcattt

SEQ ID NO: 2355 - DNA, 19 bp, Artificial Sequence
  Description of Artificial Sequence: Synthetic oligonucleotide
actcaggacatcttctttc

SEQ ID NO: 2356 - DNA, 19 bp, Homo sapiens
gtacctgctggaattgtca

SEQ ID NO: 2357 - DNA, 19 bp, Artificial Sequence
  Description of Artificial Sequence: Synthetic oligonucleotide
gttccagcaggtatagtga

SEQ ID NO: 2358 - DNA, 19 bp, Homo sapiens
gtgacttcagtgcagaata

SEQ ID NO: 2359 - DNA, 19 bp, Artificial Sequence
  Description of Artificial Sequence: Synthetic oligonucleotide
gagattttagcgctgagta

SEQ ID NO: 2360 - DNA, 19 bp, Homo sapiens
gtgcagaatatgaagaaga

SEQ ID NO: 2361 - DNA, 19 bp, Artificial Sequence
  Description of Artificial Sequence: Synthetic oligonucleotide
gcgctgagtacgaggagga

SEQ ID NO: 2362 - DNA, 21 bp, Homo sapiens
gatggcaaatatgaaggactt

SEQ ID NO: 2363 - DNA, 21 bp, Artificial Sequence
  Description of Artificial Sequence: Synthetic oligonucleotide
gacgggaagtacgagggtcta

SEQ ID NO: 2364 - DNA, 25 bp, Homo sapiens
gcttctggcttgctaacctctctga

SEQ ID NO: 2365 - DNA, 25 bp, Artificial Sequence
  Description of Artificial Sequence: Synthetic oligonucleotide
gcatcagggttacttacgtcactca

SEQ ID NO: 2366 - DNA, 29 bp, Homo sapiens
gcttctggcttgctaacctctctgaaaga

SEQ ID NO: 2367 - DNA, 29 bp, Artificial Sequence
  Description of Artificial Sequence: Synthetic oligonucleotide
gcatcagggttacttacgtcactcaagga

SEQ ID NO: 2368 - DNA, 19 bp, Homo sapiens
gcttctggcttgctaacct

SEQ ID NO: 2369 - DNA, 19 bp, Artificial Sequence
  Description of Artificial Sequence: Synthetic oligonucleotide
gcatcagggttacttacgt

SEQ ID NO: 2370 - DNA, 21 bp, Homo sapiens
ggcttgctaacctctctgaaa

SEQ ID NO: 2371 - DNA, 21 bp, Artificial Sequence
  Description of Artificial Sequence: Synthetic oligonucleotide
gggttacttacgtcactcaag

SEQ ID NO: 2372 - DNA, 25 bp, Homo sapiens
ggcttgctaacctctctgaaagaca

SEQ ID NO: 2373 - DNA, 25 bp, Artificial Sequence
  Description of Artificial Sequence: Synthetic oligonucleotide
gggttacttacgtcactcaaggata

SEQ ID NO: 2374 - DNA, 19 bp, Homo sapiens
ggcttgctaacctctctga

SEQ ID NO: 2375 - DNA, 19 bp, Artificial Sequence
  Description of Artificial Sequence: Synthetic oligonucleotide
gggttacttacgtcactca

SEQ ID NO: 2376 - DNA, 25 bp, Homo sapiens
gcttgctaacctctctgaaagacaa

SEQ ID NO: 2377 - DNA, 25 bp, Artificial Sequence
  Description of Artificial Sequence: Synthetic oligonucleotide
ggttacttacgtcactcaaggataa

SEQ ID NO: 2378 - DNA, 19 bp, Homo sapiens
gcttgctaacctctctgaa

SEQ ID NO: 2379 - DNA, 19 bp, Artificial Sequence
  Description of Artificial Sequence: Synthetic oligonucleotide
ggttacttacgtcactcaa

SEQ ID NO: 2380 - DNA, 21 bp, Homo sapiens
gctaacctctctgaaagacaa

SEQ ID NO: 2381 - DNA, 21 bp, Artificial Sequence
  Description of Artificial Sequence: Synthetic oligonucleotide
acttacgtcactcaaggataa

SEQ ID NO: 2382 - DNA, 19 bp, Homo sapiens
gggccattaggcaaattga

SEQ ID NO: 2383 - DNA, 19 bp, Artificial Sequence
  Description of Artificial Sequence: Synthetic oligonucleotide
gcgcgataagacagataga

SEQ ID NO: 2384 - DNA, 21 bp, Homo sapiens
ggccattaggcaaattgatga

SEQ ID NO: 2385 - DNA, 21 bp, Artificial Sequence
  Description of Artificial Sequence: Synthetic oligonucleotide
cgcgataagacagatagacga

SEQ ID NO: 2386 - DNA, 19 bp, Homo sapiens
ggccattaggcaaattgat

SEQ ID NO: 2387 - DNA, 19 bp, Artificial Sequence
  Description of Artificial Sequence: Synthetic oligonucleotide
cgcgataagacagatagac

SEQ ID NO: 2388 - DNA, 25 bp, Homo sapiens
ggacctaccaagagtggaaggacaa

SEQ ID NO: 2389 - DNA, 25 bp, Artificial Sequence
  Description of Artificial Sequence: Synthetic oligonucleotide
gcacgtatcaggaatggaaagataa

SEQ ID NO: 2390 - DNA, 25 bp, Homo sapiens
gtggacaaggtggatgaagagagat

SEQ ID NO: 2391 - DNA, 25 bp, Artificial Sequence
  Description of Artificial Sequence: Synthetic oligonucleotide
ctggactagatggatgaaaagggac

SEQ ID NO: 2392 - DNA, 19 bp, Homo sapiens
gacaaggtggatgaagaga

SEQ ID NO: 2393 - DNA, 19 bp, Artificial Sequence
  Description of Artificial Sequence: Synthetic oligonucleotide
gactagatggatgaaaagg

SEQ ID NO: 2394 - DNA, 19 bp, Homo sapiens
gaccttcgaggcaagttta

SEQ ID NO: 2395 - DNA, 19 bp, Artificial Sequence
  Description of Artificial Sequence: Synthetic oligonucleotide
gatctacgtgggaaattca

SEQ ID NO: 2396 - DNA, 19 bp, Homo sapiens
ggtagagcagctgacagaa

SEQ ID NO: 2397 - DNA, 19 bp, Artificial Sequence
  Description of Artificial Sequence: Synthetic oligonucleotide
cgttgaacaactcactgag

SEQ ID NO: 2398 - DNA, 19 bp, Homo sapiens
aggagctgcaggagatgat

SEQ ID NO: 2399 - DNA, 19 bp, Artificial Sequence
  Description of Artificial Sequence: Synthetic oligonucleotide
aagaactccaagaaatgat

SEQ ID NO: 2400 - DNA, 19 bp, Homo sapiens
gatggttcggtgcatgaag

SEQ ID NO: 2401 - DNA, 19 bp, Artificial Sequence
  Description of Artificial Sequence: Synthetic oligonucleotide
gatggtacgctgtatgaaa

SEQ ID NO: 2402 - DNA, 29 bp, Homo sapiens
gcatgaaggacgacagcaaagggaaatct

SEQ ID NO: 2403 - DNA, 29 bp, Artificial Sequence
  Description of Artificial Sequence: Synthetic oligonucleotide
gtatgaaagatgatagtaagggcaagtca

SEQ ID NO: 2404 - DNA, 29 bp, Homo sapiens
atgaaggacgacagcaaagggaaatctga

SEQ ID NO: 2405 - DNA, 29 bp, Artificial Sequence
  Description of Artificial Sequence: Synthetic oligonucleotide
atgaaagatgatagtaagggcaagtcaga

SEQ ID NO: 2406 - DNA, 25 bp, Homo sapiens
gaaggacgacagcaaagggaaatct

SEQ ID NO: 2407 - DNA, 25 bp, Artificial Sequence
  Description of Artificial Sequence: Synthetic oligonucleotide
gaaagatgatagtaagggcaagtca

SEQ ID NO: 2408 - DNA, 25 bp, Homo sapiens
aggacgacagcaaagggaaatctga

SEQ ID NO: 2409 - DNA, 25 bp, Artificial Sequence
  Description of Artificial Sequence: Synthetic oligonucleotide
aagatgatagtaagggcaagtcaga

SEQ ID NO: 2410 - DNA, 25 bp, Homo sapiens
ggacgacagcaaagggaaatctgag

SEQ ID NO: 2411 - DNA, 25 bp, Artificial Sequence
  Description of Artificial Sequence: Synthetic oligonucleotide
agatgatagtaagggcaagtcagaa

SEQ ID NO: 2412 - DNA, 21 bp, Homo sapiens
gacgacagcaaagggaaatct

SEQ ID NO: 2413 - DNA, 21 bp, Artificial Sequence
  Description of Artificial Sequence: Synthetic oligonucleotide
gatgatagtaagggcaagtca

SEQ ID NO: 2414 - DNA, 19 bp, Homo sapiens
acagcaaagggaaatctga

SEQ ID NO: 2415 - DNA, 19 bp, Artificial Sequence
  Description of Artificial Sequence: Synthetic oligonucleotide
atagtaagggcaagtcaga

SEQ ID NO: 2416 - DNA, 29 bp, Homo sapiens
gcaaagggaaatctgaggaggagctgtct

SEQ ID NO: 2417 - DNA, 29 bp, Artificial Sequence
  Description of Artificial Sequence: Synthetic oligonucleotide
gtaagggcaagtcagaagaagaactctca

SEQ ID NO: 2418 - DNA, 29 bp, Homo sapiens
aaagggaaatctgaggaggagctgtctga

SEQ ID NO: 2419 - DNA, 29 bp, Artificial Sequence
  Description of Artificial Sequence: Synthetic oligonucleotide
aagggcaagtcagaagaagaactctcaga

SEQ ID NO: 2420 - DNA, 25 bp, Homo sapiens
agggaaatctgaggaggagctgtct

SEQ ID NO: 2421 - DNA, 25 bp, Artificial Sequence
  Description of Artificial Sequence: Synthetic oligonucleotide
gggcaagtcagaagaagaactctca

SEQ ID NO: 2422 - DNA, 25 bp, Homo sapiens
ggaaatctgaggaggagctgtctga

SEQ ID NO: 2423 - DNA, 25 bp, Artificial Sequence
  Description of Artificial Sequence: Synthetic oligonucleotide
gcaagtcagaagaagaactctcaga

SEQ ID NO: 2424 - DNA, 25 bp, Homo sapiens
gaaatctgaggaggagctgtctgac

SEQ ID NO: 2425 - DNA, 25 bp, Artificial Sequence
  Description of Artificial Sequence: Synthetic oligonucleotide
caagtcagaagaagaactctcagat

SEQ ID NO: 2426 - DNA, 21 bp, Homo sapiens
aaatctgaggaggagctgtct

SEQ ID NO: 2427 - DNA, 21 bp, Artificial Sequence
  Description of Artificial Sequence: Synthetic oligonucleotide
aagtcagaagaagaactctca

SEQ ID NO: 2428 - DNA, 19 bp, Homo sapiens
atctgaggaggagctgtct

SEQ ID NO: 2429 - DNA, 19 bp, Artificial Sequence
  Description of Artificial Sequence: Synthetic oligonucleotide
gtcagaagaagaactctca

SEQ ID NO: 2430 - DNA, 29 bp, Homo sapiens
aggagctgtctgacctcttccgcatgttt

SEQ ID NO: 2431 - DNA, 29 bp, Artificial Sequence
  Description of Artificial Sequence: Synthetic oligonucleotide
aagaactctcagatctgtttcggatgttc

SEQ ID NO: 2432 - DNA, 19 bp, Homo sapiens
aggagctgtctgacctctt

SEQ ID NO: 2433 - DNA, 19 bp, Artificial Sequence
  Description of Artificial Sequence: Synthetic oligonucleotide
aagaactctcagatctgtt

SEQ ID NO: 2434 - DNA, 25 bp, Homo sapiens
gctgtctgacctcttccgcatgttt

SEQ ID NO: 2435 - DNA, 25 bp, Artificial Sequence
  Description of Artificial Sequence: Synthetic oligonucleotide
actctcagatctgtttcggatgttc

SEQ ID NO: 2436 - DNA, 25 bp, Homo sapiens
atcgacctggatgagctgaagataa

SEQ ID NO: 2437 - DNA, 25 bp, Artificial Sequence
  Description of Artificial Sequence: Synthetic oligonucleotide
attgatctcgacgaactcaaaatta

SEQ ID NO: 2438 - DNA, 21 bp, Homo sapiens
gacctggatgagctgaagata

SEQ ID NO: 2439 - DNA, 21 bp, Artificial Sequence
  Description of Artificial Sequence: Synthetic oligonucleotide
gatctcgacgaactcaaaatt

SEQ ID NO: 2440 - DNA, 19 bp, Homo sapiens
gacctggatgagctgaaga

SEQ ID NO: 2441 - DNA, 19 bp, Artificial Sequence
  Description of Artificial Sequence: Synthetic oligonucleotide
gatctcgacgaactcaaaa

SEQ ID NO: 2442 - DNA, 21 bp, Homo sapiens
acctggatgagctgaagataa

SEQ ID NO: 2443 - DNA, 21 bp, Artificial Sequence
  Description of Artificial Sequence: Synthetic oligonucleotide
atctcgacgaactcaaaatta

SEQ ID NO: 2444 - DNA, 19 bp, Homo sapiens
acctggatgagctgaagat

SEQ ID NO: 2445 - DNA, 19 bp, Artificial Sequence
  Description of Artificial Sequence: Synthetic oligonucleotide
atctcgacgaactcaaaat

SEQ ID NO: 2446 - DNA, 19 bp, Homo sapiens
ggatgagctgaagataatg

SEQ ID NO: 2447 - DNA, 19 bp, Artificial Sequence
  Description of Artificial Sequence: Synthetic oligonucleotide
cgacgaactcaaaattatg

SEQ ID NO: 2448 - DNA, 29 bp, Homo sapiens
gagctgaagataatgctgcaggctacagg

SEQ ID NO: 2449 - DNA, 29 bp, Artificial Sequence
  Description of Artificial Sequence: Synthetic oligonucleotide
gaactcaaaattatgctccaagcaactgg

SEQ ID NO: 2450 - DNA, 25 bp, Homo sapiens
aggacgacatcgaggagctcatgaa

SEQ ID NO: 2451 - DNA, 25 bp, Artificial Sequence
  Description of Artificial Sequence: Synthetic oligonucleotide
aagatgatattgaagaactgatgaa

SEQ ID NO: 2452 - DNA, 21 bp, Homo sapiens
acgacatcgaggagctcatga

SEQ ID NO: 2453 - DNA, 21 bp, Artificial Sequence
  Description of Artificial Sequence: Synthetic oligonucleotide
atgatattgaagaactgatga

SEQ ID NO: 2454 - DNA, 29 bp, Homo sapiens
atcgaggagctcatgaaggacggagacaa

SEQ ID NO: 2455 - DNA, 29 bp, Artificial Sequence
  Description of Artificial Sequence: Synthetic oligonucleotide
attgaagaactgatgaaagatggtgataa

SEQ ID NO: 2456 - DNA, 29 bp, Homo sapiens
gaggagctcatgaaggacggagacaagaa

SEQ ID NO: 2457 - DNA, 29 bp, Artificial Sequence
  Description of Artificial Sequence: Synthetic oligonucleotide
gaagaactgatgaaagatggtgataaaaa

SEQ ID NO: 2458 - DNA, 25 bp, Homo sapiens
aggagctcatgaaggacggagacaa

SEQ ID NO: 2459 - DNA, 25 bp, Artificial Sequence
  Description of Artificial Sequence: Synthetic oligonucleotide
aagaactgatgaaagatggtgataa

SEQ ID NO: 2460 - DNA, 29 bp, Homo sapiens
gagctcatgaaggacggagacaagaacaa

SEQ ID NO: 2461 - DNA, 29 bp, Artificial Sequence
  Description of Artificial Sequence: Synthetic oligonucleotide
gaactgatgaaagatggtgataaaaataa

SEQ ID NO: 2462 - DNA, 25 bp, Homo sapiens
gagctcatgaaggacggagacaaga

SEQ ID NO: 2463 - DNA, 25 bp, Artificial Sequence
  Description of Artificial Sequence: Synthetic oligonucleotide
gaactgatgaaagatggtgataaaa

SEQ ID NO: 2464 - DNA, 25 bp, Homo sapiens
agctcatgaaggacggagacaagaa

SEQ ID NO: 2465 - DNA, 25 bp, Artificial Sequence
  Description of Artificial Sequence: Synthetic oligonucleotide
aactgatgaaagatggtgataaaaa

SEQ ID NO: 2466 - DNA, 21 bp, Homo sapiens
agctcatgaaggacggagaca

SEQ ID NO: 2467 - DNA, 21 bp, Artificial Sequence
  Description of Artificial Sequence: Synthetic oligonucleotide
aactgatgaaagatggtgata

SEQ ID NO: 2468 - DNA, 25 bp, Homo sapiens
gctcatgaaggacggagacaagaac

SEQ ID NO: 2469 - DNA, 25 bp, Artificial Sequence
  Description of Artificial Sequence: Synthetic oligonucleotide
actgatgaaagatggtgataaaaat

SEQ ID NO: 2470 - DNA, 21 bp, Homo sapiens
gctcatgaaggacggagacaa

SEQ ID NO: 2471 - DNA, 21 bp, Artificial Sequence
  Description of Artificial Sequence: Synthetic oligonucleotide
actgatgaaagatggtgataa

SEQ ID NO: 2472 - DNA, 21 bp, Homo sapiens
gaaggacggagacaagaacaa

SEQ ID NO: 2473 - DNA, 21 bp, Artificial Sequence
  Description of Artificial Sequence: Synthetic oligonucleotide
gaaagatggtgataaaaataa

SEQ ID NO: 2474 - DNA, 19 bp, Homo sapiens
gaaggacggagacaagaac

SEQ ID NO: 2475 - DNA, 19 bp, Artificial Sequence
  Description of Artificial Sequence: Synthetic oligonucleotide
gaaagatggtgataaaaat

SEQ ID NO: 2476 - DNA, 19 bp, Homo sapiens
aggacggagacaagaacaa

SEQ ID NO: 2477 - DNA, 19 bp, Artificial Sequence
  Description of Artificial Sequence: Synthetic oligonucleotide
aagatggtgataaaaataa

SEQ ID NO: 2478 - DNA, 19 bp, Homo sapiens
ggacggagacaagaacaac

SEQ ID NO: 2479 - DNA, 19 bp, Artificial Sequence
  Description of Artificial Sequence: Synthetic oligonucleotide
agatggtgataaaaataat

SEQ ID NO: 2480 - DNA, 21 bp, Homo sapiens
ggcacctaagaaagcaaagaa

SEQ ID NO: 2481 - DNA, 21 bp, Artificial Sequence
  Description of Artificial Sequence: Synthetic oligonucleotide
ggctccaaaaaaggctaaaaa

SEQ ID NO: 2482 - DNA, 25 bp, Homo sapiens
ggcacctaagaaagcaaagaagaga

SEQ ID NO: 2483 - DNA, 25 bp, Artificial Sequence
  Description of Artificial Sequence: Synthetic oligonucleotide
ggctccaaaaaaggctaaaaaaagg

SEQ ID NO: 2484 - DNA, 19 bp, Homo sapiens
gccaactccaacgtgttct

SEQ ID NO: 2485 - DNA, 19 bp, Artificial Sequence
  Description of Artificial Sequence: Synthetic oligonucleotide
gcgaattcgaatgtctttt

SEQ ID NO: 2486 - DNA, 29 bp, Homo sapiens
ggaggccttcactatcatggaccagaaca

SEQ ID NO: 2487 - DNA, 29 bp, Artificial Sequence
  Description of Artificial Sequence: Synthetic oligonucleotide
agaagcgtttacaattatggatcaaaata

SEQ ID NO: 2488 - DNA, 25 bp, Homo sapiens
gccttcactatcatggaccagaaca

SEQ ID NO: 2489 - DNA, 25 bp, Artificial Sequence
  Description of Artificial Sequence: Synthetic oligonucleotide
gcgtttacaattatggatcaaaata

SEQ ID NO: 2490 - DNA, 25 bp, Homo sapiens
ggaccagaacagggatggcttcatt

SEQ ID NO: 2491 - DNA, 25 bp, Artificial Sequence
  Description of Artificial Sequence: Synthetic oligonucleotide
ggatcaaaatagagacgggtttata

SEQ ID NO: 2492 - DNA, 29 bp, Homo sapiens
ggaccagaacagggatggcttcattgaca

SEQ ID NO: 2493 - DNA, 29 bp, Artificial Sequence
  Description of Artificial Sequence: Synthetic oligonucleotide
ggatcaaaatagagacgggtttatagata

SEQ ID NO: 2494 - DNA, 21 bp, Homo sapiens
gggatggcttcattgacaaga

SEQ ID NO: 2495 - DNA, 21 bp, Artificial Sequence
  Description of Artificial Sequence: Synthetic oligonucleotide
gagacgggtttatagataaaa

SEQ ID NO: 2496 - DNA, 21 bp, Homo sapiens
ggatggcttcattgacaagaa

SEQ ID NO: 2497 - DNA, 21 bp, Artificial Sequence
  Description of Artificial Sequence: Synthetic oligonucleotide
agacgggtttatagataaaaa

SEQ ID NO: 2498 - DNA, 29 bp, Homo sapiens
ggatggcttcattgacaagaacgatctga

SEQ ID NO: 2499 - DNA, 29 bp, Artificial Sequence
  Description of Artificial Sequence: Synthetic oligonucleotide
agacgggtttatagataaaaatgacctca

SEQ ID NO: 2500 - DNA, 19 bp, Homo sapiens
gatggcttcattgacaaga

SEQ ID NO: 2501 - DNA, 19 bp, Artificial Sequence
  Description of Artificial Sequence: Synthetic oligonucleotide
gacgggtttatagataaaa

SEQ ID NO: 2502 - DNA, 25 bp, Homo sapiens
ggcttcattgacaagaacgatctga

SEQ ID NO: 2503 - DNA, 25 bp, Artificial Sequence
  Description of Artificial Sequence: Synthetic oligonucleotide
gggtttatagataaaaatgacctca

SEQ ID NO: 2504 - DNA, 29 bp, Homo sapiens
ggcttcattgacaagaacgatctgagaga

SEQ ID NO: 2505 - DNA, 29 bp, Artificial Sequence
  Description of Artificial Sequence: Synthetic oligonucleotide
gggtttatagataaaaatgacctcaggga

SEQ ID NO: 2506 - DNA, 21 bp, Homo sapiens
gaacgatctgagagacacctt

SEQ ID NO: 2507 - DNA, 21 bp, Artificial Sequence
  Description of Artificial Sequence: Synthetic oligonucleotide
aaatgacctcagggatacgtt

SEQ ID NO: 2508 - DNA, 29 bp, Homo sapiens
gaggctccgggtccaattaactttactgt

SEQ ID NO: 2509 - DNA, 29 bp, Artificial Sequence
  Description of Artificial Sequence: Synthetic oligonucleotide
gaagcacccggacctataaatttcacagt

SEQ ID NO: 2510 - DNA, 21 bp, Homo sapiens
ggctccgggtccaattaactt

SEQ ID NO: 2511 - DNA, 21 bp, Artificial Sequence
  Description of Artificial Sequence: Synthetic oligonucleotide
agcacccggacctataaattt

SEQ ID NO: 2512 - DNA, 25 bp, Homo sapiens
ggctccgggtccaattaactttact

SEQ ID NO: 2513 - DNA, 25 bp, Artificial Sequence
  Description of Artificial Sequence: Synthetic oligonucleotide
agcacccggacctataaatttcaca

SEQ ID NO: 2514 - DNA, 21 bp, Homo sapiens
gctccgggtccaattaacttt

SEQ ID NO: 2515 - DNA, 21 bp, Artificial Sequence
  Description of Artificial Sequence: Synthetic oligonucleotide
gcacccggacctataaatttc

SEQ ID NO: 2516 - DNA, 19 bp, Homo sapiens
gggtccaattaactttact

SEQ ID NO: 2517 - DNA, 19 bp, Artificial Sequence
  Description of Artificial Sequence: Synthetic oligonucleotide
cggacctataaatttcaca

SEQ ID NO: 2518 - DNA, 21 bp, Homo sapiens
gggtccaattaactttactgt

SEQ ID NO: 2519 - DNA, 21 bp, Artificial Sequence
  Description of Artificial Sequence: Synthetic oligonucleotide
cggacctataaatttcacagt

SEQ ID NO: 2520 - DNA, 19 bp, Homo sapiens
gtccaattaactttactgt

SEQ ID NO: 2521 - DNA, 19 bp, Artificial Sequence
  Description of Artificial Sequence: Synthetic oligonucleotide
gacctataaatttcacagt

SEQ ID NO: 2522 - DNA, 29 bp, Homo sapiens
gaggaaaccattctcaacgcattcaaagt

SEQ ID NO: 2523 - DNA, 29 bp, Artificial Sequence
  Description of Artificial Sequence: Synthetic oligonucleotide
gaagagacgatactgaatgcttttaaggt

SEQ ID NO: 2524 - DNA, 25 bp, Homo sapiens
ggaaaccattctcaacgcattcaaa

SEQ ID NO: 2525 - DNA, 25 bp, Artificial Sequence
  Description of Artificial Sequence: Synthetic oligonucleotide
agagacgatactgaatgcttttaag

SEQ ID NO: 2526 - DNA, 29 bp, Homo sapiens
gaaaccattctcaacgcattcaaagtgtt

SEQ ID NO: 2527 - DNA, 29 bp, Artificial Sequence
  Description of Artificial Sequence: Synthetic oligonucleotide
gagacgatactgaatgcttttaaggtctt

SEQ ID NO: 2528 - DNA, 19 bp, Homo sapiens
gggtgctgaaggctgatta

SEQ ID NO: 2529 - DNA, 19 bp, Artificial Sequence
  Description of Artificial Sequence: Synthetic oligonucleotide
gcgtcctcaaagcagacta

SEQ ID NO: 2530 - DNA, 21 bp, Homo sapiens
ggtgctgaaggctgattacgt

SEQ ID NO: 2531 - DNA, 21 bp, Artificial Sequence
  Description of Artificial Sequence: Synthetic oligonucleotide
cgtcctcaaagcagactatgt

SEQ ID NO: 2532 - DNA, 29 bp, Homo sapiens
ggctgattacgttcgggaaatgctgacca

SEQ ID NO: 2533 - DNA, 29 bp, Artificial Sequence
  Description of Artificial Sequence: Synthetic oligonucleotide
agcagactatgtacgcgagatgctcacga

SEQ ID NO: 2534 - DNA, 19 bp, Homo sapiens
gttcgggaaatgctgacca

SEQ ID NO: 2535 - DNA, 19 bp, Artificial Sequence
  Description of Artificial Sequence: Synthetic oligonucleotide
gtacgcgagatgctcacga

SEQ ID NO: 2536 - DNA, 21 bp, Homo sapiens
ggaggaggttgaccagatgtt

SEQ ID NO: 2537 - DNA, 21 bp, Artificial Sequence
  Description of Artificial Sequence: Synthetic oligonucleotide
agaagaagtagatcaaatgtt

SEQ ID NO: 2538 - DNA, 19 bp, Homo sapiens
gaggaggttgaccagatgt

SEQ ID NO: 2539 - DNA, 19 bp, Artificial Sequence
  Description of Artificial Sequence: Synthetic oligonucleotide
gaagaagtagatcaaatgt

SEQ ID NO: 2540 - DNA, 25 bp, Homo sapiens
gacgtgactggcaacttggactaca

SEQ ID NO: 2541 - DNA, 25 bp, Artificial Sequence
  Description of Artificial Sequence: Synthetic oligonucleotide
gatgtcacagggaatttagattata

SEQ ID NO: 2542 - DNA, 21 bp, Homo sapiens
gactggcaacttggactacaa

SEQ ID NO: 2543 - DNA, 21 bp, Artificial Sequence
  Description of Artificial Sequence: Synthetic oligonucleotide
cacagggaatttagattataa

SEQ ID NO: 2544 - DNA, 29 bp, Homo sapiens
ggactacaagaacctggtgcacatcatca

SEQ ID NO: 2545 - DNA, 29 bp, Artificial Sequence
  Description of Artificial Sequence: Synthetic oligonucleotide
agattataaaaatctcgtccatattatta

SEQ ID NO: 2546 - DNA, 29 bp, Homo sapiens
gtgcacatcatcacccacggagaagagaa

SEQ ID NO: 2547 - DNA, 29 bp, Artificial Sequence
  Description of Artificial Sequence: Synthetic oligonucleotide
gtccatattattacgcatggtgaggaaaa

SEQ ID NO: 2548 - DNA, 19 bp, Homo sapiens
gatgcttccaagatcaaga

SEQ ID NO: 2549 - DNA, 19 bp, Artificial Sequence
  Description of Artificial Sequence: Synthetic oligonucleotide
gacgcatcgaaaattaaaa

SEQ ID NO: 2550 - DNA, 25 bp, Homo sapiens
gatgaagatcacctacgggcagtgt

SEQ ID NO: 2551 - DNA, 25 bp, Artificial Sequence
  Description of Artificial Sequence: Synthetic oligonucleotide
aatgaaaattacgtatggccaatgc

SEQ ID NO: 2552 - DNA, 21 bp, Homo sapiens
gaagccaagacaggaagagct

SEQ ID NO: 2553 - DNA, 21 bp, Artificial Sequence
  Description of Artificial Sequence: Synthetic oligonucleotide
caaacctaggcaagaggaact

SEQ ID NO: 2554 - DNA, 29 bp, Homo sapiens
gaagccaagacaggaagagctcaatacca

SEQ ID NO: 2555 - DNA, 29 bp, Artificial Sequence
  Description of Artificial Sequence: Synthetic oligonucleotide
caaacctaggcaagaggaactgaacacga

SEQ ID NO: 2556 - DNA, 29 bp, Homo sapiens
gaagagctcaataccaagatgatggactt

SEQ ID NO: 2557 - DNA, 29 bp, Artificial Sequence
  Description of Artificial Sequence: Synthetic oligonucleotide
gaggaactgaacacgaaaatgatggattt

SEQ ID NO: 2558 - DNA, 19 bp, Homo sapiens
gagctcaataccaagatga

SEQ ID NO: 2559 - DNA, 19 bp, Artificial Sequence
  Description of Artificial Sequence: Synthetic oligonucleotide
gaactgaacacgaaaatga

SEQ ID NO: 2560 - DNA, 25 bp, Homo sapiens
gctcaataccaagatgatggacttt

SEQ ID NO: 2561 - DNA, 25 bp, Artificial Sequence
  Description of Artificial Sequence: Synthetic oligonucleotide
actgaacacgaaaatgatggatttc

SEQ ID NO: 2562 - DNA, 29 bp, Homo sapiens
gaggctgacagaagacgaagtggagaagt

SEQ ID NO: 2563 - DNA, 29 bp, Artificial Sequence
  Description of Artificial Sequence: Synthetic oligonucleotide
aagactcactgaggatgaggtcgaaaaat

SEQ ID NO: 2564 - DNA, 21 bp, Homo sapiens
gctgacagaagacgaagtgga

SEQ ID NO: 2565 - DNA, 21 bp, Artificial Sequence
  Description of Artificial Sequence: Synthetic oligonucleotide
actcactgaggatgaggtcga

SEQ ID NO: 2566 - DNA, 29 bp, Homo sapiens
gctgacagaagacgaagtggagaagttga

SEQ ID NO: 2567 - DNA, 29 bp, Artificial Sequence
  Description of Artificial Sequence: Synthetic oligonucleotide
actcactgaggatgaggtcgaaaaattaa

SEQ ID NO: 2568 - DNA, 19 bp, Homo sapiens
gaagacgaagtggagaagt

SEQ ID NO: 2569 - DNA, 19 bp, Artificial Sequence
  Description of Artificial Sequence: Synthetic oligonucleotide
gaggatgaggtcgaaaaat

SEQ ID NO: 2570 - DNA, 19 bp, Homo sapiens
gacgaagtggagaagttga

SEQ ID NO: 2571 - DNA, 19 bp, Artificial Sequence
  Description of Artificial Sequence: Synthetic oligonucleotide
gatgaggtcgaaaaattaa

SEQ ID NO: 2572 - DNA, 29 bp, Homo sapiens
gcaagaggactccaatggctgcatcaact

SEQ ID NO: 2573 - DNA, 29 bp, Artificial Sequence
  Description of Artificial Sequence: Synthetic oligonucleotide
ccaggaagattcgaacgggtgtattaatt

SEQ ID NO: 2574 - DNA, 25 bp, Homo sapiens
gaggactccaatggctgcatcaact

SEQ ID NO: 2575 - DNA, 25 bp, Artificial Sequence
  Description of Artificial Sequence: Synthetic oligonucleotide
gaagattcgaacgggtgtattaatt

SEQ ID NO: 2576 - DNA, 25 bp, Homo sapiens
gcgaatactctggctcctggaactt

SEQ ID NO: 2577 - DNA, 25 bp, Artificial Sequence
  Description of Artificial Sequence: Synthetic oligonucleotide
gggagtattcagggtcgtggaattt

SEQ ID NO: 2578 - DNA, 21 bp, Homo sapiens
gccgtgtcagcttccttaaga

SEQ ID NO: 2579 - DNA, 21 bp, Artificial Sequence
  Description of Artificial Sequence: Synthetic oligonucleotide
gtcgagtgagttttctaaaaa

SEQ ID NO: 2580 - DNA, 21 bp, Homo sapiens
gccaaccaggagtccaacatt

SEQ ID NO: 2581 - DNA, 21 bp, Artificial Sequence
  Description of Artificial Sequence: Synthetic oligonucleotide
gcgaatcaagaatcgaatata

SEQ ID NO: 2582 - DNA, 21 bp, Homo sapiens
gtccaacattgctcgcacttt

SEQ ID NO: 2583 - DNA, 21 bp, Artificial Sequence
  Description of Artificial Sequence: Synthetic oligonucleotide
atcgaatatagcacggacatt

SEQ ID NO: 2584 - DNA, 29 bp, Homo sapiens
gacttctaccagccaggtccggaatatca

SEQ ID NO: 2585 - DNA, 29 bp, Artificial Sequence
  Description of Artificial Sequence: Synthetic oligonucleotide
gatttttatcaacctggacccgagtacca

SEQ ID NO: 2586 - DNA, 21 bp, Homo sapiens
gcatggtgatcctgctgaaca

SEQ ID NO: 2587 - DNA, 21 bp, Artificial Sequence
  Description of Artificial Sequence: Synthetic oligonucleotide
gtatggtcattctcctcaata

SEQ ID NO: 2588 - DNA, 21 bp, Homo sapiens
ggcccagatcgtcaaggatat

SEQ ID NO: 2589 - DNA, 21 bp, Artificial Sequence
  Description of Artificial Sequence: Synthetic oligonucleotide
agcgcaaattgtgaaagacat

SEQ ID NO: 2590 - DNA, 25 bp, Homo sapiens
ggtgaaccgagaccccaagaacatt

SEQ ID NO: 2591 - DNA, 25 bp, Artificial Sequence
  Description of Artificial Sequence: Synthetic oligonucleotide
cgtcaatcgtgatccgaaaaatata

SEQ ID NO: 2592 - DNA, 25 bp, Homo sapiens
gtgaaccgagaccccaagaacatta

SEQ ID NO: 2593 - DNA, 25 bp, Artificial Sequence
  Description of Artificial Sequence: Synthetic oligonucleotide
gtcaatcgtgatccgaaaaatataa

SEQ ID NO: 2594 - DNA, 21 bp, Homo sapiens
gaaccgagaccccaagaacat

SEQ ID NO: 2595 - DNA, 21 bp, Artificial Sequence
  Description of Artificial Sequence: Synthetic oligonucleotide
caatcgtgatccgaaaaatat

SEQ ID NO: 2596 - DNA, 29 bp, Homo sapiens
gagaccccaagaacattaacgaggacata

SEQ ID NO: 2597 - DNA, 29 bp, Artificial Sequence
  Description of Artificial Sequence: Synthetic oligonucleotide
gtgatccgaaaaatataaatgaagatatt

SEQ ID NO: 2598 - DNA, 25 bp, Homo sapiens
gaccccaagaacattaacgaggaca

SEQ ID NO: 2599 - DNA, 25 bp, Artificial Sequence
  Description of Artificial Sequence: Synthetic oligonucleotide
gatccgaaaaatataaatgaagata

SEQ ID NO: 2600 - DNA, 29 bp, Homo sapiens
gaccccaagaacattaacgaggacatagt

SEQ ID NO: 2601 - DNA, 29 bp, Artificial Sequence
  Description of Artificial Sequence: Synthetic oligonucleotide
gatccgaaaaatataaatgaagatattgt

SEQ ID NO: 2602 - DNA, 19 bp, Homo sapiens
gaacattaacgaggacata

SEQ ID NO: 2603 - DNA, 19 bp, Artificial Sequence
  Description of Artificial Sequence: Synthetic oligonucleotide
aaatataaatgaagatatt

SEQ ID NO: 2604 - DNA, 21 bp, Homo sapiens
gaacattaacgaggacatagt

SEQ ID NO: 2605 - DNA, 21 bp, Artificial Sequence
  Description of Artificial Sequence: Synthetic oligonucleotide
aaatataaatgaagatattgt

SEQ ID NO: 2606 - DNA, 19 bp, Homo sapiens
gagctacaccaccttcact

SEQ ID NO: 2607 - DNA, 19 bp, Artificial Sequence
  Description of Artificial Sequence: Synthetic oligonucleotide
cagttatacgacgtttaca

SEQ ID NO: 2608 - DNA, 21 bp, Homo sapiens
gagctacaccaccttcactgt

SEQ ID NO: 2609 - DNA, 21 bp, Artificial Sequence
  Description of Artificial Sequence: Synthetic oligonucleotide
cagttatacgacgtttacagt

SEQ ID NO: 2610 - DNA, 19 bp, Homo sapiens
gctacaccaccttcactgt

SEQ ID NO: 2611 - DNA, 19 bp, Artificial Sequence
  Description of Artificial Sequence: Synthetic oligonucleotide
gttatacgacgtttacagt

SEQ ID NO: 2612 - DNA, 21 bp, Homo sapiens
gctacaccaccttcactgtct

SEQ ID NO: 2613 - DNA, 21 bp, Artificial Sequence
  Description of Artificial Sequence: Synthetic oligonucleotide
gttatacgacgtttacagtgt

SEQ ID NO: 2614 - DNA, 21 bp, Homo sapiens
gcatctccttctgccacatct

SEQ ID NO: 2615 - DNA, 21 bp, Artificial Sequence
  Description of Artificial Sequence: Synthetic oligonucleotide
gtatttcgttttgtcatattt

SEQ ID NO: 2616 - DNA, 21 bp, Homo sapiens
gccatgcattaagagctacct

SEQ ID NO: 2617 - DNA, 21 bp, Artificial Sequence
  Description of Artificial Sequence: Synthetic oligonucleotide
cccttgtataaaaagttatct

SEQ ID NO: 2618 - DNA, 21 bp, Homo sapiens
ggaacgcaagagagcattact

SEQ ID NO: 2619 - DNA, 21 bp, Artificial Sequence
  Description of Artificial Sequence: Synthetic oligonucleotide
cgagcggaaaagggctttgct

SEQ ID NO: 2620 - DNA, 21 bp, Homo sapiens
gaacgcaagagagcattactt

SEQ ID NO: 2621 - DNA, 21 bp, Artificial Sequence
  Description of Artificial Sequence: Synthetic oligonucleotide
gagcggaaaagggctttgcta

SEQ ID NO: 2622 - DNA, 19 bp, Homo sapiens
gagctacacggttcatact

SEQ ID NO: 2623 - DNA, 19 bp, Artificial Sequence
  Description of Artificial Sequence: Synthetic oligonucleotide
gggcaactcgctttattct

SEQ ID NO: 2624 - DNA, 21 bp, Homo sapiens
gagctacacggttcatactga

SEQ ID NO: 2625 - DNA, 21 bp, Artificial Sequence
  Description of Artificial Sequence: Synthetic oligonucleotide
gggcaactcgctttattctca

SEQ ID NO: 2626 - DNA, 19 bp, Homo sapiens
gctacacggttcatactga

SEQ ID NO: 2627 - DNA, 19 bp, Artificial Sequence
  Description of Artificial Sequence: Synthetic oligonucleotide
gcaactcgctttattctca

SEQ ID NO: 2628 - DNA, 19 bp, Homo sapiens
gaaggatgatatgagaaat

SEQ ID NO: 2629 - DNA, 19 bp, Artificial Sequence
  Description of Artificial Sequence: Synthetic oligonucleotide
caaagacgacatgaggaac

SEQ ID NO: 2630 - DNA, 29 bp, Homo sapiens
gccctctaagaccaactccagcagtcaaa

SEQ ID NO: 2631 - DNA, 29 bp, Artificial Sequence
  Description of Artificial Sequence: Synthetic oligonucleotide
ggccacttaggcctacacctgctgtgaag

SEQ ID NO: 2632 - DNA, 19 bp, Homo sapiens
gaccaactccagcagtcaa

SEQ ID NO: 2633 - DNA, 19 bp, Artificial Sequence
  Description of Artificial Sequence: Synthetic oligonucleotide
ggcctacacctgctgtgaa

SEQ ID NO: 2634 - DNA, 25 bp, Homo sapiens
gatgctcaaacaaggaaacagatat

SEQ ID NO: 2635 - DNA, 25 bp, Artificial Sequence
  Description of Artificial Sequence: Synthetic oligonucleotide
gacgcacagactagaaagcaaattt

SEQ ID NO: 2636 - DNA, 19 bp, Homo sapiens
gctcaaacaaggaaacaga

SEQ ID NO: 2637 - DNA, 19 bp, Artificial Sequence
  Description of Artificial Sequence: Synthetic oligonucleotide
gcacagactagaaagcaaa

SEQ ID NO: 2638 - DNA, 21 bp, Homo sapiens
gctcaaacaaggaaacagata

SEQ ID NO: 2639 - DNA, 21 bp, Artificial Sequence
  Description of Artificial Sequence: Synthetic oligonucleotide
gcacagactagaaagcaaatt

SEQ ID NO: 2640 - DNA, 29 bp, Homo sapiens
gctcaaacaaggaaacagatatgtattct

SEQ ID NO: 2641 - DNA, 29 bp, Artificial Sequence
  Description of Artificial Sequence: Synthetic oligonucleotide
gcacagactagaaagcaaatttgcatact

SEQ ID NO: 2642 - DNA, 19 bp, Homo sapiens
ggaaacagatatgtattct

SEQ ID NO: 2643 - DNA, 19 bp, Artificial Sequence
  Description of Artificial Sequence: Synthetic oligonucleotide
gaaagcaaatttgcatact

SEQ ID NO: 2644 - DNA, 25 bp, Homo sapiens
gaaggactacattaccattcaaagt

SEQ ID NO: 2645 - DNA, 25 bp, Artificial Sequence
  Description of Artificial Sequence: Synthetic oligonucleotide
aaaagattatataacgatacagagc

SEQ ID NO: 2646 - DNA, 19 bp, Homo sapiens
ggactacattaccattcaa

SEQ ID NO: 2647 - DNA, 19 bp, Artificial Sequence
  Description of Artificial Sequence: Synthetic oligonucleotide
agattatataacgatacag

SEQ ID NO: 2648 - DNA, 25 bp, Homo sapiens
ggactacattaccattcaaagtatt

SEQ ID NO: 2649 - DNA, 25 bp, Artificial Sequence
  Description of Artificial Sequence: Synthetic oligonucleotide
agattatataacgatacagagcata

SEQ ID NO: 2650 - DNA, 19 bp, Homo sapiens
gcagcttcctccattgtca

SEQ ID NO: 2651 - DNA, 19 bp, Artificial Sequence
  Description of Artificial Sequence: Synthetic oligonucleotide
gctgcatcgtcgatagtga

SEQ ID NO: 2652 - DNA, 21 bp, Homo sapiens
gcagcttcctccattgtcaca

SEQ ID NO: 2653 - DNA, 21 bp, Artificial Sequence
  Description of Artificial Sequence: Synthetic oligonucleotide
gctgcatcgtcgatagtgact

SEQ ID NO: 2654 - DNA, 25 bp, Homo sapiens
gcagcttcctccattgtcacactgt

SEQ ID NO: 2655 - DNA, 25 bp, Artificial Sequence
  Description of Artificial Sequence: Synthetic oligonucleotide
gctgcatcgtcgatagtgactctct

SEQ ID NO: 2656 - DNA, 19 bp, Homo sapiens
gtcagttggaccacagtgt

SEQ ID NO: 2657 - DNA, 19 bp, Artificial Sequence
  Description of Artificial Sequence: Synthetic oligonucleotide
gtgagctggacgactgtct

SEQ ID NO: 2658 - DNA, 25 bp, Homo sapiens
ggacctctgctaatatacctcctct

SEQ ID NO: 2659 - DNA, 25 bp, Artificial Sequence
  Description of Artificial Sequence: Synthetic oligonucleotide
ggtccactccttatttatctgctgt

SEQ ID NO: 2660 - DNA, 19 bp, Homo sapiens
gacctctgctaatatacct

SEQ ID NO: 2661 - DNA, 19 bp, Artificial Sequence
  Description of Artificial Sequence: Synthetic oligonucleotide
gtccactccttatttatct

SEQ ID NO: 2662 - DNA, 25 bp, Homo sapiens
gacctctgctaatatacctcctctt

SEQ ID NO: 2663 - DNA, 25 bp, Artificial Sequence
  Description of Artificial Sequence: Synthetic oligonucleotide
gtccactccttatttatctgctgtt

SEQ ID NO: 2664 - DNA, 19 bp, Homo sapiens
gctaatatacctcctcttt

SEQ ID NO: 2665 - DNA, 19 bp, Artificial Sequence
  Description of Artificial Sequence: Synthetic oligonucleotide
ccttatttatctgctgttc

SEQ ID NO: 2666 - DNA, 19 bp, Homo sapiens
gaggatcccatgtatatat

SEQ ID NO: 2667 - DNA, 19 bp, Artificial Sequence
  Description of Artificial Sequence: Synthetic oligonucleotide
aagaattccttgcatttac

SEQ ID NO: 2668 - DNA, 19 bp, Homo sapiens
ggcttgcttctgtcattgt

SEQ ID NO: 2669 - DNA, 19 bp, Artificial Sequence
  Description of Artificial Sequence: Synthetic oligonucleotide
agcatgtttttgccactgc

SEQ ID NO: 2670 - DNA, 21 bp, Homo sapiens
ggcttgcttctgtcattgtat

SEQ ID NO: 2671 - DNA, 21 bp, Artificial Sequence
  Description of Artificial Sequence: Synthetic oligonucleotide
agcatgtttttgccactgcat

SEQ ID NO: 2672 - DNA, 19 bp, Homo sapiens
gcttgcttctgtcattgta

SEQ ID NO: 2673 - DNA, 19 bp, Artificial Sequence
  Description of Artificial Sequence: Synthetic oligonucleotide
gcatgtttttgccactgca

SEQ ID NO: 2674 - DNA, 21 bp, Homo sapiens
gcttgcttctgtcattgtata

SEQ ID NO: 2675 - DNA, 21 bp, Artificial Sequence
  Description of Artificial Sequence: Synthetic oligonucleotide
gcatgtttttgccactgcatt

SEQ ID NO: 2676 - DNA, 29 bp, Homo sapiens
gggatttacttcttggattgcctactaca

SEQ ID NO: 2677 - DNA, 29 bp, Artificial Sequence
  Description of Artificial Sequence: Synthetic oligonucleotide
gggtttcacatcatggatagcgtattata

SEQ ID NO: 2678 - DNA, 29 bp, Homo sapiens
ggatttacttcttggattgcctactacat

SEQ ID NO: 2679 - DNA, 29 bp, Artificial Sequence
  Description of Artificial Sequence: Synthetic oligonucleotide
ggtttcacatcatggatagcgtattatat

SEQ ID NO: 2680 - DNA, 25 bp, Homo sapiens
gatttacttcttggattgcctacta

SEQ ID NO: 2681 - DNA, 25 bp, Artificial Sequence
  Description of Artificial Sequence: Synthetic oligonucleotide
gtttcacatcatggatagcgtatta

SEQ ID NO: 2682 - DNA, 29 bp, Homo sapiens
gatttacttcttggattgcctactacatt

SEQ ID NO: 2683 - DNA, 29 bp, Artificial Sequence
  Description of Artificial Sequence: Synthetic oligonucleotide
gtttcacatcatggatagcgtattatata

SEQ ID NO: 2684 - DNA, 19 bp, Homo sapiens
gattgcctactacattaat

SEQ ID NO: 2685 - DNA, 19 bp, Artificial Sequence
  Description of Artificial Sequence: Synthetic oligonucleotide
gatagcgtattatataaac

SEQ ID NO: 2686 - DNA, 25 bp, Homo sapiens
gcctactacattaatcatccactat

SEQ ID NO: 2687 - DNA, 25 bp, Artificial Sequence
  Description of Artificial Sequence: Synthetic oligonucleotide
gcgtattatataaaccaccctcttt

SEQ ID NO: 2688 - DNA, 19 bp, Homo sapiens
gaaacaggcaaatcacagt

SEQ ID NO: 2689 - DNA, 19 bp, Artificial Sequence
  Description of Artificial Sequence: Synthetic oligonucleotide
gtaatagacagattactgt

SEQ ID NO: 2690 - DNA, 25 bp, Homo sapiens
ggcaaatcacagtatctgctatcaa

SEQ ID NO: 2691 - DNA, 25 bp, Artificial Sequence
  Description of Artificial Sequence: Synthetic oligonucleotide
gacagattactgtttcagcaattaa

SEQ ID NO: 2692 - DNA, 25 bp, Homo sapiens
gcaaatcacagtatctgctatcaat

SEQ ID NO: 2693 - DNA, 25 bp, Artificial Sequence
  Description of Artificial Sequence: Synthetic oligonucleotide
acagattactgtttcagcaattaac

SEQ ID NO: 2694 - DNA, 19 bp, Homo sapiens
gctgggaatcatttcatca

SEQ ID NO: 2695 - DNA, 19 bp, Artificial Sequence
  Description of Artificial Sequence: Synthetic oligonucleotide
gcaggcaaccactttatta

SEQ ID NO: 2696 - DNA, 21 bp, Homo sapiens
gctgggaatcatttcatcaat

SEQ ID NO: 2697 - DNA, 21 bp, Artificial Sequence
  Description of Artificial Sequence: Synthetic oligonucleotide
gcaggcaaccactttattaac

SEQ ID NO: 2698 - DNA, 25 bp, Homo sapiens
gcctgtttcccaagtccaaattata

SEQ ID NO: 2699 - DNA, 25 bp, Artificial Sequence
  Description of Artificial Sequence: Synthetic oligonucleotide
gcgtgctttcctagccctaactaca

SEQ ID NO: 2700 - DNA, 19 bp, Homo sapiens
gtttcccaagtccaaatta

SEQ ID NO: 2701 - DNA, 19 bp, Artificial Sequence
  Description of Artificial Sequence: Synthetic oligonucleotide
gctttcctagccctaacta

SEQ ID NO: 2702 - DNA, 21 bp, Homo sapiens
gtttcccaagtccaaattata

SEQ ID NO: 2703 - DNA, 21 bp, Artificial Sequence
  Description of Artificial Sequence: Synthetic oligonucleotide
gctttcctagccctaactaca

SEQ ID NO: 2704 - DNA, 25 bp, Homo sapiens
ggtttcatgtcctaactacacctat

SEQ ID NO: 2705 - DNA, 25 bp, Artificial Sequence
  Description of Artificial Sequence: Synthetic oligonucleotide
cgtatcttgcccaaattatacgtac

SEQ ID NO: 2706 - DNA, 19 bp, Homo sapiens
gtttcatgtcctaactaca

SEQ ID NO: 2707 - DNA, 19 bp, Artificial Sequence
  Description of Artificial Sequence: Synthetic oligonucleotide
gtatcttgcccaaattata

SEQ ID NO: 2708 - DNA, 19 bp, Homo sapiens
gtcctaactacacctatga

SEQ ID NO: 2709 - DNA, 19 bp, Artificial Sequence
  Description of Artificial Sequence: Synthetic oligonucleotide
gcccaaattatacgtacga

SEQ ID NO: 2710 - DNA, 21 bp, Homo sapiens
gtcctaactacacctatgaga

SEQ ID NO: 2711 - DNA, 21 bp, Artificial Sequence
  Description of Artificial Sequence: Synthetic oligonucleotide
gcccaaattatacgtacgaaa

SEQ ID NO: 2712 - DNA, 21 bp, Homo sapiens
gagattggatcatggattagt

SEQ ID NO: 2713 - DNA, 21 bp, Artificial Sequence
  Description of Artificial Sequence: Synthetic oligonucleotide
gaaataggttcttggataagc

SEQ ID NO: 2714 - DNA, 29 bp, Homo sapiens
gagattggatcatggattagtttcacagt

SEQ ID NO: 2715 - DNA, 29 bp, Artificial Sequence
  Description of Artificial Sequence: Synthetic oligonucleotide
gaaataggttcttggataagctttactgt

SEQ ID NO: 2716 - DNA, 19 bp, Homo sapiens
gattggatcatggattagt

SEQ ID NO: 2717 - DNA, 19 bp, Artificial Sequence
  Description of Artificial Sequence: Synthetic oligonucleotide
aataggttcttggataagc

SEQ ID NO: 2718 - DNA, 21 bp, Homo sapiens
gattggatcatggattagttt

SEQ ID NO: 2719 - DNA, 21 bp, Artificial Sequence
  Description of Artificial Sequence: Synthetic oligonucleotide
aataggttcttggataagctt

SEQ ID NO: 2720 - DNA, 25 bp, Homo sapiens
gattggatcatggattagtttcaca

SEQ ID NO: 2721 - DNA, 25 bp, Artificial Sequence
  Description of Artificial Sequence: Synthetic oligonucleotide
aataggttcttggataagctttact

SEQ ID NO: 2722 - DNA, 29 bp, Homo sapiens
gattggatcatggattagtttcacagtca

SEQ ID NO: 2723 - DNA, 29 bp, Artificial Sequence
  Description of Artificial Sequence: Synthetic oligonucleotide
aataggttcttggataagctttactgtga

SEQ ID NO: 2724 - DNA, 19 bp, Homo sapiens
ggatcatggattagtttca

SEQ ID NO: 2725 - DNA, 19 bp, Artificial Sequence
  Description of Artificial Sequence: Synthetic oligonucleotide
ggttcttggataagcttta

SEQ ID NO: 2726 - DNA, 21 bp, Homo sapiens
ggatcatggattagtttcaca

SEQ ID NO: 2727 - DNA, 21 bp, Artificial Sequence
  Description of Artificial Sequence: Synthetic oligonucleotide
ggttcttggataagctttact

SEQ ID NO: 2728 - DNA, 25 bp, Homo sapiens
ggatcatggattagtttcacagtca

SEQ ID NO: 2729 - DNA, 25 bp, Artificial Sequence
  Description of Artificial Sequence: Synthetic oligonucleotide
ggttcttggataagctttactgtga

SEQ ID NO: 2730 - DNA, 25 bp, Homo sapiens
gatcatggattagtttcacagtcat

SEQ ID NO: 2731 - DNA, 25 bp, Artificial Sequence
  Description of Artificial Sequence: Synthetic oligonucleotide
gttcttggataagctttactgtgat

SEQ ID NO: 2732 - DNA, 19 bp, Homo sapiens
ggattagtttcacagtcat

SEQ ID NO: 2733 - DNA, 19 bp, Artificial Sequence
  Description of Artificial Sequence: Synthetic oligonucleotide
ggataagctttactgtgat

SEQ ID NO: 2734 - DNA, 21 bp, Homo sapiens
ggattagtttcacagtcatga

SEQ ID NO: 2735 - DNA, 21 bp, Artificial Sequence
  Description of Artificial Sequence: Synthetic oligonucleotide
ggataagctttactgtgatga

SEQ ID NO: 2736 - DNA, 19 bp, Homo sapiens
gatgagtatccagatgtct

SEQ ID NO: 2737 - DNA, 19 bp, Artificial Sequence
  Description of Artificial Sequence: Synthetic oligonucleotide
catgagcattcaaatgtca

SEQ ID NO: 2738 - DNA, 25 bp, Homo sapiens
gaaagatacagatagtgaagaagaa

SEQ ID NO: 2739 - RNA, 25 nt, Homo sapiens
gaaagauacagauagugaagaagaa

SEQ ID NO: 2740 - DNA, 25 bp, Homo sapiens
gctgatggtaatggcacaattgact

SEQ ID NO: 2741 - RNA, 25 nt, Homo sapiens
gcugaugguaauggcacaauugacu

SEQ ID NO: 2742 - DNA, 25 bp, Homo sapiens
gatgaggaggtggatgagatgatca

SEQ ID NO: 2743 - RNA, 25 nt, Homo sapiens
gaugaggagguggaugagaugauca

SEQ ID NO: 2744 - DNA, 29 bp, Homo sapiens
gtgccgtagctcttatctagcaaatgaaa

SEQ ID NO: 2745 - RNA, 29 nt, Homo sapiens
gugccguagcucuuaucuagcaaaugaaa

SEQ ID NO: 2746 - DNA, 21 bp, Homo sapiens
aaggaagcctgtatattctta

SEQ ID NO: 2747 - RNA, 21 nt, Homo sapiens
aaggaagccuguauauucuua

SEQ ID NO: 2748 - DNA, 29 bp, Homo sapiens
gcagtctagtaggaagaaatggagtagga

SEQ ID NO: 2749 - RNA, 29 nt, Homo sapiens
gcagucuaguaggaagaaauggaguagga

SEQ ID NO: 2750 - DNA, 21 bp, Homo sapiens
gaagaagaagaggaagcaaag

SEQ ID NO: 2751 - DNA, 21 bp, Homo sapiens
aagctgagaaggcagcagatg

SEQ ID NO: 2752 - RNA, 21 nt, Homo sapiens
aagcugagaaggcagcagaug

SEQ ID NO: 2753 - DNA, 28 bp, Homo sapiens
ggcagatcaagcgccagaatggagatga

SEQ ID NO: 2754 - RNA, 28 nt, Homo sapiens
ggcagaucaagcgccagaauggagauga

SEQ ID NO: 2755 - DNA, 21 bp, Homo sapiens
tgtctcttgctgatctgtatc

SEQ ID NO: 2756 - RNA, 21 nt, Homo sapiens
ugucucuugcugaucuguauc

SEQ ID NO: 2757 - DNA, 21 bp, Homo sapiens
aaggatccgtggaggttgcct

SEQ ID NO: 2758 - DNA, 21 bp, Artificial Sequence
  Description of Artificial Sequence: Synthetic oligonucleotide
aaagacccctggagattacca

SEQ ID NO: 2759 - DNA, 21 bp, Homo sapiens
aagatcctgcatgtcttccat

SEQ ID NO: 2760 - DNA, 21 bp, Artificial Sequence
  Description of Artificial Sequence: Synthetic oligonucleotide
aaaattctccacgtgtttcac

SEQ ID NO: 2761 - DNA, 21 bp, Homo sapiens
ggtcaccgacttcgagaatgt

SEQ ID NO: 2762 - DNA, 21 bp, Artificial Sequence
  Description of Artificial Sequence: Synthetic oligonucleotide
ggtgacggattttgaaaacgt

SEQ ID NO: 2763 - DNA, 25 bp, Homo sapiens
gcaccctcataggcctggagtttat

SEQ ID NO: 2764 - DNA, 25 bp, Artificial Sequence
  Description of Artificial Sequence: Synthetic oligonucleotide
ggacgctgattgggctcgaattcat

SEQ ID NO: 2765 - DNA, 19 bp, Homo sapiens
gagttgaggcagagactga

SEQ ID NO: 2766 - DNA, 19 bp, Artificial Sequence
  Description of Artificial Sequence: Synthetic oligonucleotide
gaattaagacaaaggctca

SEQ ID NO: 2767 - DNA, 21 bp, Homo sapiens
gaggcagagactgatccactt

SEQ ID NO: 2768 - DNA, 21 bp, Artificial Sequence
  Description of Artificial Sequence: Synthetic oligonucleotide
aagacaaaggctcattcattt

SEQ ID NO: 2769 - DNA, 21 bp, Homo sapiens
ggcagagactgatccacttct

SEQ ID NO: 2770 - DNA, 21 bp, Artificial Sequence
  Description of Artificial Sequence: Synthetic oligonucleotide
gacaaaggctcattcattttt

SEQ ID NO: 2771 - DNA, 19 bp, Homo sapiens
ggcagagactgatccactt

SEQ ID NO: 2772 - DNA, 19 bp, Artificial Sequence
  Description of Artificial Sequence: Synthetic oligonucleotide
gacaaaggctcattcattt

SEQ ID NO: 2773 - DNA, 21 bp, Homo sapiens
aactgcagcgtccacacagct

SEQ ID NO: 2774 - DNA, 21 bp, Artificial Sequence
  Description of Artificial Sequence: Synthetic oligonucleotide
aattgtagtgtgcatactgca

SEQ ID NO: 2775 - DNA, 15 bp, Homo sapiens
cggagtacgtggtcc

SEQ ID NO: 2776 - DNA, 15 bp, Homo sapiens
cggagtaagtggtcc

SEQ ID NO: 2777 - DNA, 15 bp, Homo sapiens
gggctccgtggtctt

SEQ ID NO: 2778 - DNA, 15 bp, Homo sapiens
gggctccatggtctt

SEQ ID NO: 2779 - DNA, 15 bp, Homo sapiens
gggctcggtggtctt

SEQ ID NO: 2780 - DNA, 15 bp, Homo sapiens
cagtccattgggaag

SEQ ID NO: 2781 - DNA, 15 bp, Homo sapiens
cagtccagtgggaag

SEQ ID NO: 2782 - DNA, 15 bp, Homo sapiens
tcccagcggtaggtg

SEQ ID NO: 2783 - DNA, 15 bp, Homo sapiens
tcccagcagtaggtg

SEQ ID NO: 2784 - protein, 286 aa, Escherichia coli
MSIQHFRVALIPFFAAFCLPVFAHPETLVKVKDAEDQLGARVGYIELDLNSGKILESFRPEERFPMMSTFKVLLCGAVLSRIDAGQEQLGRRIHYSQNDLVEYSPVTEKHLTDGMTVRELCSAAITMSDNTAANLLLTTIGGPKELTAFLHNMGDHVTRLDRWEPELNEAIPNDERDTTMPVAMATTLRKLLTGELLTLASRQQLIDWMEADKVAGPLLRSALPAGWFIADKSGAGERGSRGIIAALGPDGKPSRIVVIYTTGSQATMDERNRQIAEIGASLIKHW

What is claimed is:

1. A nucleic acid construct comprising:
(a) a first nucleotide sequence encoding an RNAi molecule capable of hybridizing to a target sequence encoding an endogenous KCNQ1 polypeptide within a cell and suppressing expression of said endogenous KCNQ1 polypeptide within said cell, and
(b) a second nucleotide sequence encoding a KCNQ1 polypeptide, wherein said second nucleotide sequence comprises a target sequence identical to said target sequence of said first nucleotide sequence with the exception that said target sequence of said second nucleotide sequence comprises 1 to 13 wobble position variants as compared to said target sequence of said first nucleotide sequence, and wherein said RNAi molecule does not suppress expression of said KCNQ1 polypeptide from said second nucleotide sequence within said cell.

2. The nucleic acid construct of claim 1, wherein said first nucleotide sequence comprises the sequence set forth in SEQ ID NO:12, SEQ ID NO:13, SEQ ID NO:15, or SEQ ID NO:36, and wherein said second nucleotide sequence comprises the sequence set forth in SEQ ID NO:9.

3. The nucleic acid construct of claim 1, wherein said first nucleotide sequence comprises the sequence set forth in SEQ ID NO:36 and said second nucleotide sequence comprises the sequence set forth in SEQ ID NO:9.

4. The nucleic acid construct of any one of claims 1 to 3, wherein said first nucleotide sequence is operably linked to a first promoter and said second nucleotide sequence is operably linked to a second promoter.

5. The nucleic acid construct of claim 4, wherein said first and second promoters are the same.

6. The nucleic acid construct of claim 4, wherein said first and second promoters are different.

7. The nucleic acid construct of claim 6, wherein said first promoter is a U6 promoter and said second promoter is a cytomegalovirus immediate-early (CMV) promoter.

8. The nucleic acid construct of any one of claims 1 to 7, further comprising a nucleotide sequence encoding a reporter.

9. The nucleic acid construct of claim 8, wherein said reporter is a fluorescent polypeptide.

10. The nucleic acid construct of claim 8 or claim 9, wherein said nucleotide sequence encoding said reporter is downstream of said second nucleotide sequence encoding said cDNA, and is separated from said second nucleotide sequence by an internal ribozyme entry sequence (IRES) or P2A self-cleaving peptide sequence.

11. The nucleic acid construct of any one of claims 1 to 10, wherein said nucleic acid construct is within a viral vector.

12. The nucleic acid construct of claim 11, wherein said viral vector is an adeno-associated virus (AAV) vector.

13. The nucleic acid construct of claim 12, wherein said AAV vector is an AAV serotype 9 vector or an AAV2/9 vector.

14. The nucleic acid construct of any one of claims 1 to 13, wherein said cell is a cardiomyocyte.

15. A virus particle comprising the nucleic acid construct of any one of claims 1 to 14.

16. A method for treating a mammal having a congenital cardiac disease, said method comprising administering to said mammal a nucleic acid construct comprising:
(a) a first nucleotide sequence encoding an RNAi molecule capable of hybridizing to a target sequence encoding an endogenous KCNQ1 polypeptide within a cell of said mammal and suppressing expression of said endogenous KCNQ1 polypeptide within said cell, and
(b) a second nucleotide sequence encoding a KCNQ1 polypeptide, wherein said second nucleotide sequence comprises a target sequence identical to said target sequence of said first nucleotide sequence with the exception that said target sequence of said second nucleotide sequence comprises 1 to 13 wobble position variants as compared to said target sequence of said first nucleotide sequence, and wherein said RNAi molecule does not suppress expression of said KCNQ1 polypeptide from said second nucleotide sequence within said cell.

17. The method of claim 16, wherein said congenital cardiac disease is long QT syndrome (LQTS) or short QT syndrome (SQTS).

18. The method of claim 16, wherein said congenital cardiac disease is LQT1.

19. The method of any one of claims 16 to 18, wherein said first nucleotide sequence comprises the sequence set forth in SEQ ID NO:12, SEQ ID NO:13, SEQ ID NO:15, or SEQ ID NO:36, and wherein said second nucleotide sequence comprises the sequence set forth in SEQ ID NO:9.

20. The method of any one of claims 16 to 18, wherein said first nucleotide sequence comprises the sequence set forth in SEQ ID NO:36 and said second nucleotide sequence comprises the sequence set forth in SEQ ID NO:9.

21. The method of any one of claims 16 to 20, wherein said first nucleotide sequence is operably linked to a first promoter and said second nucleotide sequence is operably linked to a second promoter.

22. The method of claim 21, wherein said first and second promoters are the same.

23. The method of claim 21, wherein said first and second promoters are different.

24. The method of claim 21, wherein said first promoter is a U6 promoter and said second promoter is a CMV promoter.

25. The method of any one of claims 16 to 24, wherein said nucleic acid construct further comprises a nucleotide sequence encoding a reporter.

26. The method of claim 25, wherein said reporter is a fluorescent polypeptide.

27. The method of claim 25 or claim 26, wherein said nucleotide sequence encoding said reporter is downstream of said second nucleotide sequence encoding said cDNA, and is separated from said second nucleotide sequence by an IRES.

28. The method of any one of claims 16 to 27, wherein said nucleic acid construct is within a viral vector.

29. The method of claim 28, wherein said viral vector is an AAV vector.

30. The method of claim 29, wherein said AAV vector is an AAV serotype 9 vector or an AAV2/9 vector.

31. The method of any one of claims 16 to 30, wherein said cell is a cardiomyocyte.

32. A method for reducing the action potential duration (APD) in cardiac cells within a mammal, said method comprising administering to said mammal a nucleic acid construct comprising:
(a) a first nucleotide sequence encoding an RNAi molecule capable of hybridizing to a target sequence encoding an endogenous KCNQ1 polypeptide within cardiac cells of said mammal and suppressing expression of said endogenous KCNQ1 polypeptide within said cardiac cells, and
(b) a second nucleotide sequence encoding a KCNQ1 polypeptide, wherein said second nucleotide sequence comprises a target sequence identical to said target sequence of said first nucleotide sequence with the exception that said target sequence of said second nucleotide sequence comprises 1 to 13 wobble position variants as compared to said target sequence of said first nucleotide sequence, and wherein said RNAi molecule does not suppress expression of said KCNQ1 polypeptide from said second nucleotide sequence within said cell.

33. The method of claim 32, wherein said first nucleotide sequence comprises the sequence set forth in SEQ ID NO:12, SEQ ID NO:13, SEQ ID NO:15, or SEQ ID NO:36, and wherein said second nucleotide sequence comprises the sequence set forth in SEQ ID NO:9.

34. The method of claim 32, wherein said first nucleotide sequence comprises the sequence set forth in SEQ ID NO:36 and said second nucleotide sequence comprises the sequence set forth in SEQ ID NO:9.

35. The method of any one of claims 32 to 34, wherein said first nucleotide sequence is operably linked to a first promoter and said second nucleotide sequence is operably linked to a second promoter.

36. The method of claim 35, wherein said first and second promoters are the same.

37. The method of claim 35, wherein said first and second promoters are different.

38. The method of claim 37, wherein said first promoter is a U6 promoter and said second promoter is a CMV promoter.

39. The method of any one of claims 32 to 38, wherein said nucleic acid construct is within a viral vector.

40. The method of claim 39, wherein said viral vector is an AAV vector.

41. The method of claim 40, wherein said AAV vector is an AAV serotype 9 vector or an AAV2/9 vector.

42. A method for reducing one or more symptoms of LQTS in a mammal, said method comprising administering to said mammal a nucleic acid construct comprising:
(a) a first nucleotide sequence encoding an RNAi molecule capable of hybridizing to a target sequence encoding an endogenous KCNQ1 polypeptide within a cell of said mammal and suppressing expression of said endogenous KCNQ1 polypeptide within said cell, and
(b) a second nucleotide sequence encoding a KCNQ1 polypeptide, wherein said second nucleotide sequence comprises a target sequence identical to said target sequence of said first nucleotide sequence with the exception that said target sequence of said second nucleotide sequence comprises 1 to 13 wobble position variants as compared to said target sequence of said first nucleotide sequence, and wherein said RNAi molecule does not suppress expression of said KCNQ1 polypeptide from said second nucleotide sequence within said cell.

43. The method of claim 42, wherein said LQTS is LQT1.

44. The method of claim 42 or claim 43, wherein said first nucleotide sequence comprises the sequence set forth in SEQ ID NO:12, SEQ ID NO:13, SEQ ID NO:15, or SEQ ID NO:36, and wherein said second nucleotide sequence comprises the sequence set forth in SEQ ID NO:9.

45. The method of claim 42 or claim 43, wherein said first nucleotide sequence comprises the sequence set forth in SEQ ID NO:36 and said second nucleotide sequence comprises the sequence set forth in SEQ ID NO:9.

46. The method of any one of claims 42 to 45, wherein said first nucleotide sequence is operably linked to a first promoter and said second nucleotide sequence is operably linked to a second promoter.

47. The method of claim 46, wherein said first and second promoters are the same.

48. The method of claim 46, wherein said first and second promoters are different.

49. The method of claim 48, wherein said first promoter is a U6 promoter and said second promoter is a CMV promoter.

50. The method of any one of claims 42 to 49, wherein said nucleic acid construct is within a viral vector.

51. The method of claim 50, wherein said viral vector is an AAV vector.

52. The method of claim 51, wherein said AAV vector is an AAV serotype 9 vector or an AAV2/9 vector.

53. The method of any one of claims 42 to 52, wherein said cell is a cardiomyocyte.

54. A nucleic acid construct comprising:
(a) a first nucleotide sequence encoding an RNAi molecule capable of hybridizing to a target sequence encoding an endogenous KCNH2 polypeptide within a cell and suppressing expression of said endogenous KCNH2 polypeptide within said cell, and
(b) a second nucleotide sequence encoding a KCNH2 polypeptide, wherein said second nucleotide sequence comprises a target sequence identical to said target sequence of said first nucleotide sequence with the exception that said target sequence of said second nucleotide sequence comprises 1 to 13 wobble position variants as compared to said target sequence of said first nucleotide sequence, and wherein said RNAi molecule does not suppress expression of said KCNH2 polypeptide from said second nucleotide sequence within said cell.

55. The nucleic acid construct of claim 54, wherein said first nucleotide sequence comprises the sequence set forth in SEQ ID NO:27 and said second nucleotide sequence comprises the sequence set forth in SEQ ID NO:29.

56. The nucleic acid construct of claim 54 or claim 55, wherein said first nucleotide sequence is operably linked to a first promoter and said second nucleotide sequence is operably linked to a second promoter.

57. The nucleic acid construct of claim 56, wherein said first and second promoters are the same.

58. The nucleic acid construct of claim 56, wherein said first and second promoters are different.

59. The nucleic acid construct of claim 58, wherein said first promoter is a U6 promoter and said second promoter is a CMV promoter.

60. The nucleic acid construct of any one of claims 54 to 59, further comprising a nucleotide sequence encoding a reporter.

61. The nucleic acid construct of claim 60, wherein said reporter is a fluorescent polypeptide.

62. The nucleic acid construct of claim 60 or claim 61, wherein said nucleotide sequence encoding said reporter is downstream of said second nucleotide sequence encoding said cDNA, and is separated from said second nucleotide sequence by an IRES or P2A self-cleaving peptide sequence.

63. The nucleic acid construct of any one of claims 54 to 62, wherein said nucleic acid construct is within a viral vector.

64. The nucleic acid construct of claim 63, wherein said viral vector is an AAV vector.

65. The nucleic acid construct of claim 64, wherein said AAV vector is an AAV serotype 9 vector or an AAV2/9 vector.

66. The nucleic acid construct of any one of claims 54 to 65, wherein said cell is a cardiomyocyte.

67. A virus particle comprising the nucleic acid construct of any one of claims 54 to 66.

68. A method for treating a mammal having a congenital cardiac disease, said method comprising administering to said mammal a nucleic acid construct comprising:
(a) a first nucleotide sequence encoding an RNAi molecule capable of hybridizing to a target sequence encoding an endogenous KCNH2 polypeptide within a cell of said mammal and suppressing expression of said endogenous KCNH2 polypeptide within said cell, and
(b) a second nucleotide sequence encoding a KCNH2 polypeptide, wherein said second nucleotide sequence comprises a target sequence identical to said target sequence of said first nucleotide sequence with the exception that said target sequence of said second nucleotide sequence comprises 1 to 13 wobble position variants as compared to said target sequence of said first nucleotide sequence, and wherein said RNAi molecule does not suppress expression of said KCNH2 polypeptide from said second nucleotide sequence within said cell.

69. The method of claim 68, wherein said congenital cardiac disease is LQTS or SQTS.

70. The method of claim 68, wherein said congenital cardiac disease is LQT2.

71. The method of any one of claims 68 to 70, wherein said first nucleotide sequence comprises the sequence set forth in SEQ ID NO:27 and said second nucleotide sequence comprises the sequence set forth in SEQ ID NO:29.

72. The method of any one of claims 68 to 71, wherein said first nucleotide sequence is operably linked to a first promoter and said second nucleotide sequence is operably linked to a second promoter.

73. The method of claim 72, wherein said first and second promoters are the same.

74. The method of claim 72, wherein said first and second promoters are different.

75. The method of claim 74, wherein said first promoter is a U6 promoter and said second promoter is a CMV promoter.

76. The method of any one of claims 68 to 75, wherein said nucleic acid construct further comprises a nucleotide sequence encoding a reporter.

77. The method of claim 76, wherein said reporter is a fluorescent polypeptide.

78. The method of claim 76 or claim 77, wherein said nucleotide sequence encoding said reporter is downstream of said second nucleotide sequence encoding said cDNA, and is separated from said second nucleotide sequence by an IRES.

79. The method of any one of claims 68 to 78, wherein said nucleic acid construct is within a viral vector.

80. The method of claim 79, wherein said viral vector is an AAV vector.

81. The method of claim 80, wherein said AAV vector is an AAV serotype 9 vector or an AAV2/9 vector.

82. The method of any one of claims 68 to 81, wherein said cell is a cardiomyocyte.

83. A method for reducing the APD in cardiac cells within a mammal, said method comprising administering to said mammal a nucleic acid construct comprising:
(a) a first nucleotide sequence encoding an RNAi molecule capable of hybridizing to a target sequence encoding an endogenous KCNH2 polypeptide within cardiac cells of said mammal and suppressing expression of said endogenous KCNH2 polypeptide within said cardiac cells, and
(b) a second nucleotide sequence encoding a KCNH2 polypeptide, wherein said second nucleotide sequence comprises a target sequence identical to said target sequence of said first nucleotide sequence with the exception that said target sequence of said second nucleotide sequence comprises 1 to 13 wobble position variants as compared to said target sequence of said first nucleotide sequence, and wherein said RNAi molecule does not suppress expression of said KCNH2 polypeptide from said second nucleotide sequence within said cell.

84. The method of claim 83, wherein said first nucleotide sequence comprises the sequence set forth in SEQ ID NO:27 and said second nucleotide sequence comprises the sequence set forth in SEQ ID NO:29.

85. The method of claim 83 or claim 84, wherein said first nucleotide sequence is operably linked to a first promoter and said second nucleotide sequence is operably linked to a second promoter.

86. The method of claim 85, wherein said first and second promoters are the same.

87. The method of claim 85, wherein said first and second promoters are different.

88. The method of claim 87, wherein said first promoter is a U6 promoter and said second promoter is a CMV promoter.

89. The method of any one of claims 83 to 88, wherein said nucleic acid construct is within a viral vector.

90. The method of claim 89, wherein said viral vector is an AAV vector.

91. The method of claim 90, wherein said AAV vector is an AAV serotype 9 vector or an AAV2/9 vector.

92. A method for reducing one or more symptoms of LQTS in a mammal, said method comprising administering to said mammal a nucleic acid construct comprising:
(a) a first nucleotide sequence encoding an RNAi molecule capable of hybridizing to a target sequence encoding an endogenous KCNH2 polypeptide within a cell of said mammal and suppressing expression of said endogenous KCNH2 polypeptide within said cell, and
(b) a second nucleotide sequence encoding a KCNH2 polypeptide, wherein said second nucleotide sequence comprises a target sequence identical to said target sequence of said first nucleotide sequence with the exception that said target sequence of said second nucleotide sequence comprises 1 to 13 wobble position variants as compared to said target sequence of said first nucleotide sequence, and wherein said RNAi molecule does not suppress expression of said KCNH2 polypeptide from said second nucleotide sequence within said cell.

93. The method of claim 92, wherein said LQTS is LQT2.

94. The method of claim 92 or claim 93, wherein said first nucleotide sequence comprises the sequence set forth in SEQ ID NO:27 and said second nucleotide sequence comprises the sequence set forth in SEQ ID NO:29.

95. The method of any one of claims 92 to 94, wherein said first nucleotide sequence is operably linked to a first promoter and said second nucleotide sequence is operably linked to a second promoter.

96. The method of claim 95, wherein said first and second promoters are the same.

97. The method of claim 95, wherein said first and second promoters are different.

98. The method of claim 97, wherein said first promoter is a U6 promoter and said second promoter is a CMV promoter.

99. The method of any one of claims 92 to 98, wherein said nucleic acid construct is within a viral vector.

100. The method of claim 99, wherein said viral vector is an AAV vector.

101. The method of claim 100, wherein said AAV vector is an AAV serotype 9 vector or an AAV2/9 vector.

102. The method of any one of claims 92 to 101, wherein said cell is a cardiomyocyte.

103. A nucleic acid construct for treating a congenital heart disease caused by an endogenous cardiac polypeptide containing one or more mutations causative of said congenital heart disease, wherein said construct comprises:
(a) a first nucleotide sequence encoding an RNAi molecule capable of hybridizing to a target sequence encoding said endogenous cardiac polypeptide within a cell and suppressing expression of said endogenous cardiac polypeptide within said cell, and
(b) a second nucleotide sequence encoding a replacement version of said endogenous cardiac polypeptide that lacks said one or more mutations causative of said congenital heart disease, wherein said second nucleotide sequence comprises a target sequence identical to said target sequence of said first nucleotide sequence with the exception that said target sequence of said second nucleotide sequence comprises 1 to 13 wobble position variants as compared to said target sequence of said first nucleotide sequence, and wherein said RNAi molecule does not suppress expression of said replacement version of said endogenous cardiac polypeptide that lacks said one or more mutations causative of said congenital heart disease from said second nucleotide sequence within said cell.

104. The nucleic acid construct of claim 103, wherein said first nucleotide sequence is operably linked to a first promoter and said second nucleotide sequence is operably linked to a second promoter.

105. The nucleic acid construct of claim 104, wherein said first and second promoters are the same.

106. The nucleic acid construct of claim 104, wherein said first and second promoters are different.

107. The nucleic acid construct of claim 106, wherein said first promoter is a U6 promoter and said second promoter is a CMV promoter.

108. The nucleic acid construct of any one of claims 103 to 107, further comprising a nucleotide sequence encoding a reporter.

109. The nucleic acid construct of claim 108, wherein said reporter is a fluorescent polypeptide.

110. The nucleic acid construct of claim 108 or claim 109, wherein said nucleotide sequence encoding said reporter is downstream of said second nucleotide sequence encoding said cDNA, and is separated from said second nucleotide sequence by an internal ribozyme entry sequence (IRES) or P2A self-cleaving peptide sequence.

111. The nucleic acid construct of any one of claims 103 to 110, wherein said nucleic acid construct is within a viral vector.

112. The nucleic acid construct of claim 111, wherein said viral vector is an AAV vector.

113. The nucleic acid construct of claim 112, wherein said AAV vector is an AAV serotype 9 vector or an AAV2/9 vector.

114. The nucleic acid construct of any one of claims 103 to 113, wherein said cell is a cardiomyocyte.

115. A virus particle comprising the nucleic acid construct of any one of claims 103 to 114.

116. A method for treating a mammal having a congenital cardiac disease, said method comprising administering to said mammal a nucleic acid construct comprising:
(a) a first nucleotide sequence encoding an RNAi molecule capable of hybridizing to a target sequence encoding said endogenous cardiac polypeptide within a cell and suppressing expression of said endogenous cardiac polypeptide within said cell, and
(b) a second nucleotide sequence encoding a replacement version of said endogenous cardiac polypeptide that lacks said one or more mutations causative of said congenital heart disease, wherein said second nucleotide sequence comprises a target sequence identical to said target sequence of said first nucleotide sequence with the exception that said target sequence of said second nucleotide sequence comprises 1 to 13 wobble position variants as compared to said target sequence of said first nucleotide sequence, and wherein said RNAi molecule does not suppress expression of said replacement version of said endogenous cardiac polypeptide that lacks said one or more mutations causative of said congenital heart disease from said second nucleotide sequence within said cell.

117. The method of claim 116, wherein said first nucleotide sequence is operably linked to a first promoter and said second nucleotide sequence is operably linked to a second promoter.

118. The method of claim 117, wherein said first and second promoters are the same.

119. The method of claim 117, wherein said first and second promoters are different.

120. The method of claim 119, wherein said first promoter is a U6 promoter and said second promoter is a CMV promoter.

121. The method of any one of claims 116 to 120, wherein said nucleic acid construct further comprises a nucleotide sequence encoding a reporter.

122. The method of claim 121, wherein said reporter is a fluorescent polypeptide.

123. The method of claim 121 or claim 122, wherein said nucleotide sequence encoding said reporter is downstream of said second nucleotide sequence encoding said cDNA, and is separated from said second nucleotide sequence by an IRES.

124. The method of any one of claims 116 to 123 wherein said nucleic acid construct is within a viral vector.

125. The method of claim 124, wherein said viral vector is an AAV vector.

126. The method of claim 125, wherein said AAV vector is an AAV serotype 9 vector or an AAV2/9 vector.

127. The method of any one of claims 116 to 126, wherein said cell is a cardiomyocyte.
